United States Patent Application Publication US 2026/0308552 A1, published October 8, 2026 (application 19/477,356).

The application's sequence listing, which the Patent Office published only in electronic form, follows.

SEQUENCE LISTING (3030 sequences)

SEQ ID NO: 1 - protein, 297 aa, synthetic construct
VTPALQMKKPKQFCRRMGQKKQRPARAGQPHSSSDAAQAPAEQPHSSSDAAQAPCPRERCLGPPTTPGPYRSIYFSSPKGHLTRLGLEFFDQPAVPLARAFLGQVLVRRLPNGTELRGRIVETEAYLGPEDEAAHSRGGRQTPRNRGMFMKPGTLYVYIIYGMYFCMNISSQGDGACVLLRALEPLEGLETMRQLRSTLRKGTASRVLKDRELCSGPSKLCQALAINKSFDQRDLAQDEAVWLERGPLEPSEPAVVAAARVGVGHAGEWARKPLRFYVRGSPWVSVVDRVAEQDTQA

SEQ ID NO: 2 - protein, 1367 aa, synthetic construct
DKKYSIGLAIGTNSVGWAVITDEYKVPSKKFKVLGNTDRHSIKKNLIGALLFDSGETAEATRLKRTARRRYTRRKNRICYLQEIFSNEMAKVDDSFFHRLEESFLVEEDKKHERHPIFGNIVDEVAYHEKYPTIYHLRKKLVDSTDKADLRLIYLALAHMIKFRGHFLIEGDLNPDNSDVDKLFIQLVQTYNQLFEENPINASGVDAKAILSARLSKSRRLENLIAQLPGEKKNGLFGNLIALSLGLTPNFKSNFDLAEDAKLQLSKDTYDDDLDNLLAQIGDQYADLFLAAKNLSDAILLSDILRVNTEITKAPLSASMIKRYDEHHQDLTLLKALVRQQLPEKYKEIFFDQSKNGYAGYIDGGASQEEFYKFIKPILEKMDGTEELLVKLNREDLLRKQRTFDNGSIPHQIHLGELHAILRRQEDFYPFLKDNREKIEKILTFRIPYYVGPLARGNSRFAWMTRKSEETITPWNFEEVVDKGASAQSFIERMTNFDKNLPNEKVLPKHSLLYEYFTVYNELTKVKYVTEGMRKPAFLSGEQKKAIVDLLFKTNRKVTVKQLKEDYFKKIECFDSVEISGVEDRFNASLGTYHDLLKIIKDKDFLDNEENEDILEDIVLTLTLFEDREMIEERLKTYAHLFDDKVMKQLKRRRYTGWGRLSRKLINGIRDKQSGKTILDFLKSDGFANRNFMQLIHDDSLTFKEDIQKAQVSGQGDSLHEHIANLAGSPAIKKGILQTVKVVDELVKVMGRHKPENIVIEMARENQTTQKGQKNSRERMKRIEEGIKELGSQILKEHPVENTQLQNEKLYLYYLQNGRDMYVDQELDINRLSDYDVDHIVPQSFLKDDSIDNKVLTRSDKNRGKSDNVPSEEVVKKMKNYWRQLLNAKLITQRKFDNLTKAERGGLSELDKAGFIKRQLVETRQITKHVAQILDSRMNTKYDENDKLIREVKVITLKSKLVSDFRKDFQFYKVREINNYHHAHDAYLNAVVGTALIKKYPKLESEFVYGDYKVYDVRKMIAKSEQEIGKATAKYFFYSNIMNFFKTEITLANGEIRKRPLIETNGETGEIVWDKGRDFATVRKVLSMPQVNIVKKTEVQTGGFSKESILPKRNSDKLIARKKDWDPKKYGGFDSPTVAYSVLVVAKVEKGKSKKLKSVKELLGITIMERSSFEKNPIDFLEAKGYKEVKKDLIIKLPKYSLFELENGRKRMLASAGELQKGNELALPSKYVNFLYLASHYEKLKGSPEDNEQKQLFVEQHKHYLDEIIEQISEFSKRVILADANLDKVLSAYNKHRDKPIREQAENIIHLFTLTNLGAPAAFKYFDTTIDRKRYTSTKEVLDATLIHQSITGLYETRIDLSQLGGD

SEQ ID NO: 3 - protein, 297 aa, synthetic construct
VTPALQMKKPKQFCRRMGQKKQRPARAGQPHSSSDAAQAPAEQPHSSSDAAQAPCPRERCLGPPTTPGPYRSIYFSSPKGHLTRLGLEFFDQPAVPLARAFLGQVLVRRLPNGTELRGRIVETAAALGPEDEAAASRGGRQTPRNRGMFMKPGTLYVYIIYGMYFCMNISSQGDGACVLLRALEPLEGLETMRQLRSTLRKGTASRVLKDRELCSGPSKLCQALAINKSFDQRDLAQDEAVWLERGPLEPSEPAVVAAARVGVGHAGEWARKPLRFYVRGSPWVSVVDRVAEQDTQA

SEQ ID NO: 4 - protein, 297 aa, synthetic construct
VTPALQMKKPKQFCRRMGQKKQRPARAGQPHSSSDAAQAPAEQPHSSSDAAQAPCPRERCLGPPTTPGPYRSIYFSSPKGHLTRLGLEFFDQPAVPLARAFLGQVLVRRLPNGTELRGRIVETEAYLGPEDEAAHSRGGRQTPRNRGMFMKPGTLYVYIIYGMYFCMSISSQGDGACVLLRALEPLEGLETMRQLRSTLRKGTASRVLKDRELCSGPSKLCQALAINKSFDQRDLAQDEAVWLERGPLEPSEPAVVAAARVGVGHAGEWARKPLRFYVRGSPWVSVVDRVAEQDTQA

SEQ ID NO: 5 - protein, 297 aa, synthetic construct
VTPALQMKKPKQFCRRMGQKKQRPARAGQPHSSSDAAQAPAEQPHSSSDAAQAPCPRERCLGPPTTPGPYRSIYFSSPKGHLTRLGLEFFDQPAVPLARAFLGQVLVRRLPNGTELRGRIVETEAYLGPEDEAAHSRGGRQTPRNRGMFMKPGTLYVYIIYGMYFCMSISSQGDGACVLLRALEPLEGLETMRQLRATLRAATAARVLADRELCSGPSKLCQALAINKSFDQRDLAQDEAVWLERGPLEPSEPAVVAAARVGVGHAGEWARKPLRFYVRGSPWVSVVDRVAEQDTQA

SEQ ID NO: 6 - protein, 297 aa, synthetic construct
VTPALQMKKPKQFCRRMGQKKQRPARAGQPHSSSDAAQAPAEQPHSSSDAAQAPCPRERCLGPPTTPGPYRSIYFSSPKGHLTRLGLEFFDQPAVPLARAFLGQVLVRRLPNGTELRGRIVETEAYLGPEDEAAHSRGGRQTPRNRGMFMKPGTLYVYIIYRMYFCMSISSQGDGACVLLRALEPLEGLETMRQLRSTLRKGTASRVLKDRELCSGPSKLCQALAINKSFDQRDLAQDEAVWLERGPLEPSEPAVVAAARVGVGHAGEWARKPLRFYVRGSPWVSVVDRVAEQDTQA

SEQ ID NO: 7 - protein, 297 aa, synthetic construct
VTPALQMKKPKQFCRRMGQKKQRPARAGQPHSSSDAAQAPAEQPHSSSDAAQAPCPRERCLGPPTTPGPYRSIYFSSPKGHLTRLGLEFFDQPAVPLARAFLGQVLVRRLPNGTELRGRIVETEAYLGPEDEAAHSRGGRQTPRNRGMFMKPGTLYVYIIYRMYFCMSISSQGDGACVLLRALEPLEGLETMRQLRATLRAATAARVLADRELCSGPSKLCQALAINKSFDQRDLAQDEAVWLERGPLEPSEPAVVAAARVGVGHAGEWARKPLRFYVRGSPWVSVVDRVAEQDTQA

SEQ ID NO: 8 - protein, 297 aa, synthetic construct
VTPALQMKKPKQFCRRMGQKKQRPARAGQPHSSSDAAQAPAEQPHSSSDAAQAPCPRERCLGPPTTPGPYRSIYFSSPKGHLTRLGLEFFDQPAVPLARAFLGQVLVRRLPNGTELRGRIVETEAYLGPEDEAAHSRGGRQTPRNRGMFMKPGTLYVYIIYRMYFCMGISSQGRGANVLLRALEPLEGLETMRQLRATLRAATAARVLADRELCSGPSKLCQALAINKSFDQRDLAQDEAVWLERGPLEPSEPAVVAAARVGVGHAGEWARKPLRFYVRGSPWVSVVDRVAERDTQA

SEQ ID NO: 9 - protein, 298 aa, synthetic construct
MVTPALQMKKPKQFCRRMGQKKQRPARAGQPHSSSDAAQAPAEQPHSSSDAAQAPCPRERCLGPPTTPGPYRSIYFSSPKGHLTRLGLEFFDQPAVPLARAFLGQVLVRRLPNGTELRGRIVETEAYLGPEDEAAHSRGGRQTPRNRGMFMKPGTLYVYIIYGMYFCMNISSQGDGACVLLRALEPLEGLETMRQLRSTLRKGTASRVLKDRELCSGPSKLCQALAINKSFDQRDLAQDEAVWLERGPLEPSEPAVVAAARVGVGHAGEWARKPLRFYVRGSPWVSVVDRVAEQDTQA

SEQ ID NO: 10 - protein, 18 aa, synthetic construct
KRTADGSEFESPKKKRKV

SEQ ID NO: 11 - protein, 17 aa, synthetic construct
KRTADGSEFEPKKKRKV

SEQ ID NO: 12 - protein, 1743 aa, synthetic construct
MKRTADGSEFESPKKKRKVSGGSDKKYSIGLAIGTNSVGWAVITDEYKVPSKKFKVLGNTDRHSIKKNLIGALLFDSGETAEATRLKRTARRRYTRRKNRICYLQEIFSNEMAKVDDSFFHRLEESFLVEEDKKHERHPIFGNIVDEVAYHEKYPTIYHLRKKLVDSTDKADLRLIYLALAHMIKFRGHFLIEGDLNPDNSDVDKLFIQLVQTYNQLFEENPINASGVDAKAILSARLSKSRRLENLIAQLPGEKKNGLFGNLIALSLGLTPNFKSNFDLAEDAKLQLSKDTYDDDLDNLLAQIGDQYADLFLAAKNLSDAILLSDILRVNTEITKAPLSASMIKRYDEHHQDLTLLKALVRQQLPEKYKEIFFDQSKNGYAGYIDGGASQEEFYKFIKPILEKMDGTEELLVKLNREDLLRKQRTFDNGSIPHQIHLGELHAILRRQEDFYPFLKDNREKIEKILTFRIPYYVGPLARGNSRFAWMTRKSEETITPWNFEEVVDKGASAQSFIERMTNFDKNLPNEKVLPKHSLLYEYFTVYNELTKVKYVTEGMRKPAFLSGEQKKAIVDLLFKTNRKVTVKQLKEDYFKKIECFDSVEISGVEDRFNASLGTYHDLLKIIKDKDFLDNEENEDILEDIVLTLTLFEDREMIEERLKTYAHLFDDKVMKQLKRRRYTGWGRLSRKLINGIRDKQSGKTILDFLKSDGFANRNFMQLIHDDSLTFKEDIQKAQVSGQGDSLHEHIANLAGSPAIKKGILQTVKVVDELVKVMGRHKPENIVIEMARENQTTQKGQKNSRERMKRIEEGIKELGSQILKEHPVENTQLQNEKLYLYYLQNGRDMYVDQELDINRLSDYDVDHIVPQSFLKDDSIDNKVLTRSDKNRGKSDNVPSEEVVKKMKNYWRQLLNAKLITQRKFDNLTKAERGGLSELDKAGFIKRQLVETRQITKHVAQILDSRMNTKYDENDKLIREVKVITLKSKLVSDFRKDFQFYKVREINNYHHAHDAYLNAVVGTALIKKYPKLESEFVYGDYKVYDVRKMIAKSEQEIGKATAKYFFYSNIMNFFKTEITLANGEIRKRPLIETNGETGEIVWDKGRDFATVRKVLSMPQVNIVKKTEVQTGGFSKESILPKRNSDKLIARKKDWDPKKYGGFDSPTVAYSVLVVAKVEKGKSKKLKSVKELLGITIMERSSFEKNPIDFLEAKGYKEVKKDLIIKLPKYSLFELENGRKRMLASAGELQKGNELALPSKYVNFLYLASHYEKLKGSPEDNEQKQLFVEQHKHYLDEIIEQISEFSKRVILADANLDKVLSAYNKHRDKPIREQAENIIHLFTLTNLGAPAAFKYFDTTIDRKRYTSTKEVLDATLIHQSITGLYETRIDLSQLGGDSGGSKRTADGSEFEPKKKRKVLGGDSGGSGGSGGSVTPALQMKKPKQFCRRMGQKKQRPARAGQPHSSSDAAQAPAEQPHSSSDAAQAPCPRERCLGPPTTPGPYRSIYFSSPKGHLTRLGLEFFDQPAVPLARAFLGQVLVRRLPNGTELRGRIVETEAYLGPEDEAAHSRGGRQTPRNRGMFMKPGTLYVYIIYRMYFCMGISSQGRGANVLLRALEPLEGLETMRQLRATLRAATAARVLADRELCSGPSKLCQALAINKSFDQRDLAQDEAVWLERGPLEPSEPAVVAAARVGVGHAGEWARKPLRFYVRGSPWVSVVDRVAERDTQASGGSKRTADGSEFEPKKKRKV

SEQ ID NO: 13 - protein, 1725 aa, synthetic construct
MSGGSDKKYSIGLAIGTNSVGWAVITDEYKVPSKKFKVLGNTDRHSIKKNLIGALLFDSGETAEATRLKRTARRRYTRRKNRICYLQEIFSNEMAKVDDSFFHRLEESFLVEEDKKHERHPIFGNIVDEVAYHEKYPTIYHLRKKLVDSTDKADLRLIYLALAHMIKFRGHFLIEGDLNPDNSDVDKLFIQLVQTYNQLFEENPINASGVDAKAILSARLSKSRRLENLIAQLPGEKKNGLFGNLIALSLGLTPNFKSNFDLAEDAKLQLSKDTYDDDLDNLLAQIGDQYADLFLAAKNLSDAILLSDILRVNTEITKAPLSASMIKRYDEHHQDLTLLKALVRQQLPEKYKEIFFDQSKNGYAGYIDGGASQEEFYKFIKPILEKMDGTEELLVKLNREDLLRKQRTFDNGSIPHQIHLGELHAILRRQEDFYPFLKDNREKIEKILTFRIPYYVGPLARGNSRFAWMTRKSEETITPWNFEEVVDKGASAQSFIERMTNFDKNLPNEKVLPKHSLLYEYFTVYNELTKVKYVTEGMRKPAFLSGEQKKAIVDLLFKTNRKVTVKQLKEDYFKKIECFDSVEISGVEDRFNASLGTYHDLLKIIKDKDFLDNEENEDILEDIVLTLTLFEDREMIEERLKTYAHLFDDKVMKQLKRRRYTGWGRLSRKLINGIRDKQSGKTILDFLKSDGFANRNFMQLIHDDSLTFKEDIQKAQVSGQGDSLHEHIANLAGSPAIKKGILQTVKVVDELVKVMGRHKPENIVIEMARENQTTQKGQKNSRERMKRIEEGIKELGSQILKEHPVENTQLQNEKLYLYYLQNGRDMYVDQELDINRLSDYDVDHIVPQSFLKDDSIDNKVLTRSDKNRGKSDNVPSEEVVKKMKNYWRQLLNAKLITQRKFDNLTKAERGGLSELDKAGFIKRQLVETRQITKHVAQILDSRMNTKYDENDKLIREVKVITLKSKLVSDFRKDFQFYKVREINNYHHAHDAYLNAVVGTALIKKYPKLESEFVYGDYKVYDVRKMIAKSEQEIGKATAKYFFYSNIMNFFKTEITLANGEIRKRPLIETNGETGEIVWDKGRDFATVRKVLSMPQVNIVKKTEVQTGGFSKESILPKRNSDKLIARKKDWDPKKYGGFDSPTVAYSVLVVAKVEKGKSKKLKSVKELLGITIMERSSFEKNPIDFLEAKGYKEVKKDLIIKLPKYSLFELENGRKRMLASAGELQKGNELALPSKYVNFLYLASHYEKLKGSPEDNEQKQLFVEQHKHYLDEIIEQISEFSKRVILADANLDKVLSAYNKHRDKPIREQAENIIHLFTLTNLGAPAAFKYFDTTIDRKRYTSTKEVLDATLIHQSITGLYETRIDLSQLGGDSGGSKRTADGSEFEPKKKRKVLGGDSGGSGGSGGSVTPALQMKKPKQFCRRMGQKKQRPARAGQPHSSSDAAQAPAEQPHSSSDAAQAPCPRERCLGPPTTPGPYRSIYFSSPKGHLTRLGLEFFDQPAVPLARAFLGQVLVRRLPNGTELRGRIVETAAALGPEDEAAASRGGRQTPRNRGMFMKPGTLYVYIIYGMYFCMNISSQGDGACVLLRALEPLEGLETMRQLRSTLRKGTASRVLKDRELCSGPSKLCQALAINKSFDQRDLAQDEAVWLERGPLEPSEPAVVAAARVGVGHAGEWARKPLRFYVRGSPWVSVVDRVAEQDTQASGGSKRTADGSEFEPKKKRKV

SEQ ID NO: 14 - protein, 1743 aa, synthetic construct
MKRTADGSEFESPKKKRKVSGGSDKKYSIGLAIGTNSVGWAVITDEYKVPSKKFKVLGNTDRHSIKKNLIGALLFDSGETAEATRLKRTARRRYTRRKNRICYLQEIFSNEMAKVDDSFFHRLEESFLVEEDKKHERHPIFGNIVDEVAYHEKYPTIYHLRKKLVDSTDKADLRLIYLALAHMIKFRGHFLIEGDLNPDNSDVDKLFIQLVQTYNQLFEENPINASGVDAKAILSARLSKSRRLENLIAQLPGEKKNGLFGNLIALSLGLTPNFKSNFDLAEDAKLQLSKDTYDDDLDNLLAQIGDQYADLFLAAKNLSDAILLSDILRVNTEITKAPLSASMIKRYDEHHQDLTLLKALVRQQLPEKYKEIFFDQSKNGYAGYIDGGASQEEFYKFIKPILEKMDGTEELLVKLNREDLLRKQRTFDNGSIPHQIHLGELHAILRRQEDFYPFLKDNREKIEKILTFRIPYYVGPLARGNSRFAWMTRKSEETITPWNFEEVVDKGASAQSFIERMTNFDKNLPNEKVLPKHSLLYEYFTVYNELTKVKYVTEGMRKPAFLSGEQKKAIVDLLFKTNRKVTVKQLKEDYFKKIECFDSVEISGVEDRFNASLGTYHDLLKIIKDKDFLDNEENEDILEDIVLTLTLFEDREMIEERLKTYAHLFDDKVMKQLKRRRYTGWGRLSRKLINGIRDKQSGKTILDFLKSDGFANRNFMQLIHDDSLTFKEDIQKAQVSGQGDSLHEHIANLAGSPAIKKGILQTVKVVDELVKVMGRHKPENIVIEMARENQTTQKGQKNSRERMKRIEEGIKELGSQILKEHPVENTQLQNEKLYLYYLQNGRDMYVDQELDINRLSDYDVDHIVPQSFLKDDSIDNKVLTRSDKNRGKSDNVPSEEVVKKMKNYWRQLLNAKLITQRKFDNLTKAERGGLSELDKAGFIKRQLVETRQITKHVAQILDSRMNTKYDENDKLIREVKVITLKSKLVSDFRKDFQFYKVREINNYHHAHDAYLNAVVGTALIKKYPKLESEFVYGDYKVYDVRKMIAKSEQEIGKATAKYFFYSNIMNFFKTEITLANGEIRKRPLIETNGETGEIVWDKGRDFATVRKVLSMPQVNIVKKTEVQTGGFSKESILPKRNSDKLIARKKDWDPKKYGGFDSPTVAYSVLVVAKVEKGKSKKLKSVKELLGITIMERSSFEKNPIDFLEAKGYKEVKKDLIIKLPKYSLFELENGRKRMLASAGELQKGNELALPSKYVNFLYLASHYEKLKGSPEDNEQKQLFVEQHKHYLDEIIEQISEFSKRVILADANLDKVLSAYNKHRDKPIREQAENIIHLFTLTNLGAPAAFKYFDTTIDRKRYTSTKEVLDATLIHQSITGLYETRIDLSQLGGDSGGSKRTADGSEFEPKKKRKVLGGDSGGSGGSGGSVTPALQMKKPKQFCRRMGQKKQRPARAGQPHSSSDAAQAPAEQPHSSSDAAQAPCPRERCLGPPTTPGPYRSIYFSSPKGHLTRLGLEFFDQPAVPLARAFLGQVLVRRLPNGTELRGRIVETEAYLGPEDEAAHSRGGRQTPRNRGMFMKPGTLYVYIIYGMYFCMNISSQGDGACVLLRALEPLEGLETMRQLRSTLRKGTASRVLKDRELCSGPSKLCQALAINKSFDQRDLAQDEAVWLERGPLEPSEPAVVAAARVGVGHAGEWARKPLRFYVRGSPWVSVVDRVAEQDTQASGGSKRTADGSEFEPKKKRKV

SEQ ID NO: 15 - protein, 1743 aa, synthetic construct
MKRTADGSEFESPKKKRKVSGGSDKKYSIGLAIGTNSVGWAVITDEYKVPSKKFKVLGNTDRHSIKKNLIGALLFDSGETAEATRLKRTARRRYTRRKNRICYLQEIFSNEMAKVDDSFFHRLEESFLVEEDKKHERHPIFGNIVDEVAYHEKYPTIYHLRKKLVDSTDKADLRLIYLALAHMIKFRGHFLIEGDLNPDNSDVDKLFIQLVQTYNQLFEENPINASGVDAKAILSARLSKSRRLENLIAQLPGEKKNGLFGNLIALSLGLTPNFKSNFDLAEDAKLQLSKDTYDDDLDNLLAQIGDQYADLFLAAKNLSDAILLSDILRVNTEITKAPLSASMIKRYDEHHQDLTLLKALVRQQLPEKYKEIFFDQSKNGYAGYIDGGASQEEFYKFIKPILEKMDGTEELLVKLNREDLLRKQRTFDNGSIPHQIHLGELHAILRRQEDFYPFLKDNREKIEKILTFRIPYYVGPLARGNSRFAWMTRKSEETITPWNFEEVVDKGASAQSFIERMTNFDKNLPNEKVLPKHSLLYEYFTVYNELTKVKYVTEGMRKPAFLSGEQKKAIVDLLFKTNRKVTVKQLKEDYFKKIECFDSVEISGVEDRFNASLGTYHDLLKIIKDKDFLDNEENEDILEDIVLTLTLFEDREMIEERLKTYAHLFDDKVMKQLKRRRYTGWGRLSRKLINGIRDKQSGKTILDFLKSDGFANRNFMQLIHDDSLTFKEDIQKAQVSGQGDSLHEHIANLAGSPAIKKGILQTVKVVDELVKVMGRHKPENIVIEMARENQTTQKGQKNSRERMKRIEEGIKELGSQILKEHPVENTQLQNEKLYLYYLQNGRDMYVDQELDINRLSDYDVDHIVPQSFLKDDSIDNKVLTRSDKNRGKSDNVPSEEVVKKMKNYWRQLLNAKLITQRKFDNLTKAERGGLSELDKAGFIKRQLVETRQITKHVAQILDSRMNTKYDENDKLIREVKVITLKSKLVSDFRKDFQFYKVREINNYHHAHDAYLNAVVGTALIKKYPKLESEFVYGDYKVYDVRKMIAKSEQEIGKATAKYFFYSNIMNFFKTEITLANGEIRKRPLIETNGETGEIVWDKGRDFATVRKVLSMPQVNIVKKTEVQTGGFSKESILPKRNSDKLIARKKDWDPKKYGGFDSPTVAYSVLVVAKVEKGKSKKLKSVKELLGITIMERSSFEKNPIDFLEAKGYKEVKKDLIIKLPKYSLFELENGRKRMLASAGELQKGNELALPSKYVNFLYLASHYEKLKGSPEDNEQKQLFVEQHKHYLDEIIEQISEFSKRVILADANLDKVLSAYNKHRDKPIREQAENIIHLFTLTNLGAPAAFKYFDTTIDRKRYTSTKEVLDATLIHQSITGLYETRIDLSQLGGDSGGSKRTADGSEFEPKKKRKVLGGDSGGSGGSGGSVTPALQMKKPKQFCRRMGQKKQRPARAGQPHSSSDAAQAPAEQPHSSSDAAQAPCPRERCLGPPTTPGPYRSIYFSSPKGHLTRLGLEFFDQPAVPLARAFLGQVLVRRLPNGTELRGRIVETEAYLGPEDEAAHSRGGRQTPRNRGMFMKPGTLYVYIIYRMYFCMSISSQGDGACVLLRALEPLEGLETMRQLRATLRAATAARVLADRELCSGPSKLCQALAINKSFDQRDLAQDEAVWLERGPLEPSEPAVVAAARVGVGHAGEWARKPLRFYVRGSPWVSVVDRVAEQDTQASGGSKRTADGSEFEPKKKRKV

SEQ ID NO: 16 - protein, 297 aa, synthetic construct
VTPALQMKKPKQFCRRMGQKKQRPARAGQPHSSSDAAQAPAEQPHSSSDAAQAPCPRERCLGPPTTPGPYRSIYFSSPKGHLTRLGLEFFDQPAVPLARAFLGQVLVRRLPNGTELRGRIVETEAYLGPEDEAAHSRGGRQTPRNRGMFMKPGTLYVYIIYRMYFCMSISSQRDGACVLLRALEPLEGLETMRQLRATLRAATAARVLADRELCSGPSKLCQALAINKSFDQRDLAQDEAVWLERGPLEPSEPAVVAAARVGVGHAGEWARKPLRFYVRGSPWVSVVDRVAEQDTQA

SEQ ID NO: 17 - protein, 1743 aa, synthetic construct
MKRTADGSEFESPKKKRKVSGGSDKKYSIGLAIGTNSVGWAVITDEYKVPSKKFKVLGNTDRHSIKKNLIGALLFDSGETAEATRLKRTARRRYTRRKNRICYLQEIFSNEMAKVDDSFFHRLEESFLVEEDKKHERHPIFGNIVDEVAYHEKYPTIYHLRKKLVDSTDKADLRLIYLALAHMIKFRGHFLIEGDLNPDNSDVDKLFIQLVQTYNQLFEENPINASGVDAKAILSARLSKSRRLENLIAQLPGEKKNGLFGNLIALSLGLTPNFKSNFDLAEDAKLQLSKDTYDDDLDNLLAQIGDQYADLFLAAKNLSDAILLSDILRVNTEITKAPLSASMIKRYDEHHQDLTLLKALVRQQLPEKYKEIFFDQSKNGYAGYIDGGASQEEFYKFIKPILEKMDGTEELLVKLNREDLLRKQRTFDNGSIPHQIHLGELHAILRRQEDFYPFLKDNREKIEKILTFRIPYYVGPLARGNSRFAWMTRKSEETITPWNFEEVVDKGASAQSFIERMTNFDKNLPNEKVLPKHSLLYEYFTVYNELTKVKYVTEGMRKPAFLSGEQKKAIVDLLFKTNRKVTVKQLKEDYFKKIECFDSVEISGVEDRFNASLGTYHDLLKIIKDKDFLDNEENEDILEDIVLTLTLFEDREMIEERLKTYAHLFDDKVMKQLKRRRYTGWGRLSRKLINGIRDKQSGKTILDFLKSDGFANRNFMQLIHDDSLTFKEDIQKAQVSGQGDSLHEHIANLAGSPAIKKGILQTVKVVDELVKVMGRHKPENIVIEMARENQTTQKGQKNSRERMKRIEEGIKELGSQILKEHPVENTQLQNEKLYLYYLQNGRDMYVDQELDINRLSDYDVDHIVPQSFLKDDSIDNKVLTRSDKNRGKSDNVPSEEVVKKMKNYWRQLLNAKLITQRKFDNLTKAERGGLSELDKAGFIKRQLVETRQITKHVAQILDSRMNTKYDENDKLIREVKVITLKSKLVSDFRKDFQFYKVREINNYHHAHDAYLNAVVGTALIKKYPKLESEFVYGDYKVYDVRKMIAKSEQEIGKATAKYFFYSNIMNFFKTEITLANGEIRKRPLIETNGETGEIVWDKGRDFATVRKVLSMPQVNIVKKTEVQTGGFSKESILPKRNSDKLIARKKDWDPKKYGGFDSPTVAYSVLVVAKVEKGKSKKLKSVKELLGITIMERSSFEKNPIDFLEAKGYKEVKKDLIIKLPKYSLFELENGRKRMLASAGELQKGNELALPSKYVNFLYLASHYEKLKGSPEDNEQKQLFVEQHKHYLDEIIEQISEFSKRVILADANLDKVLSAYNKHRDKPIREQAENIIHLFTLTNLGAPAAFKYFDTTIDRKRYTSTKEVLDATLIHQSITGLYETRIDLSQLGGDSGGSKRTADGSEFEPKKKRKVLGGDSGGSGGSGGSVTPALQMKKPKQFCRRMGQKKQRPARAGQPHSSSDAAQAPAEQPHSSSDAAQAPCPRERCLGPPTTPGPYRSIYFSSPKGHLTRLGLEFFDQPAVPLARAFLGQVLVRRLPNGTELRGRIVETEAYLGPEDEAAHSRGGRQTPRNRGMFMKPGTLYVYIIYRMYFCMSISSQRDGACVLLRALEPLEGLETMRQLRATLRAATAARVLADRELCSGPSKLCQALAINKSFDQRDLAQDEAVWLERGPLEPSEPAVVAAARVGVGHAGEWARKPLRFYVRGSPWVSVVDRVAEQDTQASGGSKRTADGSEFEPKKKRKV

SEQ ID NO: 18 - protein, 297 aa, synthetic construct
VTPALQMKKPKQFCRRMGQKKQRPARAGQPHSSSDAAQAPAEQPHSSSDAAQAPCPRERCLGPPTTPGPYRSIYFSSPKGHLTRLGLEFFDQPAVPLARAFLGQVLVRRLPNGTELRGRIVETEAYLGPEDEAAHSRGGRQTPRNRGMFMKPGTLYVYIIYRMYFCMSISSQGRGACVLLRALEPLEGLETMRQLRATLRAATAARVLADRELCSGPSKLCQALAINKSFDQRDLAQDEAVWLERGPLEPSEPAVVAAARVGVGHAGEWARKPLRFYVRGSPWVSVVDRVAEQDTQA

SEQ ID NO: 19 - protein, 1743 aa, synthetic construct
MKRTADGSEFESPKKKRKVSGGSDKKYSIGLAIGTNSVGWAVITDEYKVPSKKFKVLGNTDRHSIKKNLIGALLFDSGETAEATRLKRTARRRYTRRKNRICYLQEIFSNEMAKVDDSFFHRLEESFLVEEDKKHERHPIFGNIVDEVAYHEKYPTIYHLRKKLVDSTDKADLRLIYLALAHMIKFRGHFLIEGDLNPDNSDVDKLFIQLVQTYNQLFEENPINASGVDAKAILSARLSKSRRLENLIAQLPGEKKNGLFGNLIALSLGLTPNFKSNFDLAEDAKLQLSKDTYDDDLDNLLAQIGDQYADLFLAAKNLSDAILLSDILRVNTEITKAPLSASMIKRYDEHHQDLTLLKALVRQQLPEKYKEIFFDQSKNGYAGYIDGGASQEEFYKFIKPILEKMDGTEELLVKLNREDLLRKQRTFDNGSIPHQIHLGELHAILRRQEDFYPFLKDNREKIEKILTFRIPYYVGPLARGNSRFAWMTRKSEETITPWNFEEVVDKGASAQSFIERMTNFDKNLPNEKVLPKHSLLYEYFTVYNELTKVKYVTEGMRKPAFLSGEQKKAIVDLLFKTNRKVTVKQLKEDYFKKIECFDSVEISGVEDRFNASLGTYHDLLKIIKDKDFLDNEENEDILEDIVLTLTLFEDREMIEERLKTYAHLFDDKVMKQLKRRRYTGWGRLSRKLINGIRDKQSGKTILDFLKSDGFANRNFMQLIHDDSLTFKEDIQKAQVSGQGDSLHEHIANLAGSPAIKKGILQTVKVVDELVKVMGRHKPENIVIEMARENQTTQKGQKNSRERMKRIEEGIKELGSQILKEHPVENTQLQNEKLYLYYLQNGRDMYVDQELDINRLSDYDVDHIVPQSFLKDDSIDNKVLTRSDKNRGKSDNVPSEEVVKKMKNYWRQLLNAKLITQRKFDNLTKAERGGLSELDKAGFIKRQLVETRQITKHVAQILDSRMNTKYDENDKLIREVKVITLKSKLVSDFRKDFQFYKVREINNYHHAHDAYLNAVVGTALIKKYPKLESEFVYGDYKVYDVRKMIAKSEQEIGKATAKYFFYSNIMNFFKTEITLANGEIRKRPLIETNGETGEIVWDKGRDFATVRKVLSMPQVNIVKKTEVQTGGFSKESILPKRNSDKLIARKKDWDPKKYGGFDSPTVAYSVLVVAKVEKGKSKKLKSVKELLGITIMERSSFEKNPIDFLEAKGYKEVKKDLIIKLPKYSLFELENGRKRMLASAGELQKGNELALPSKYVNFLYLASHYEKLKGSPEDNEQKQLFVEQHKHYLDEIIEQISEFSKRVILADANLDKVLSAYNKHRDKPIREQAENIIHLFTLTNLGAPAAFKYFDTTIDRKRYTSTKEVLDATLIHQSITGLYETRIDLSQLGGDSGGSKRTADGSEFEPKKKRKVLGGDSGGSGGSGGSVTPALQMKKPKQFCRRMGQKKQRPARAGQPHSSSDAAQAPAEQPHSSSDAAQAPCPRERCLGPPTTPGPYRSIYFSSPKGHLTRLGLEFFDQPAVPLARAFLGQVLVRRLPNGTELRGRIVETEAYLGPEDEAAHSRGGRQTPRNRGMFMKPGTLYVYIIYRMYFCMSISSQGRGACVLLRALEPLEGLETMRQLRATLRAATAARVLADRELCSGPSKLCQALAINKSFDQRDLAQDEAVWLERGPLEPSEPAVVAAARVGVGHAGEWARKPLRFYVRGSPWVSVVDRVAEQDTQASGGSKRTADGSEFEPKKKRKV

SEQ ID NO: 20 - protein, 297 aa, synthetic construct
VTPALQMKKPKQFCRRMGQKKQRPARAGQPHSSSDAAQAPAEQPHSSSDAAQAPCPRERCLGPPTTPGPYRSIYFSSPKGHLTRLGLEFFDQPAVPLARAFLGQVLVRRLPNGTELRGRIVETEAYLGPEDEAAHSRGGRQTPRNRGMFMKPGTLYVYIIYRMYFCMSISSQGDGANVLLRALEPLEGLETMRQLRATLRAATAARVLADRELCSGPSKLCQALAINKSFDQRDLAQDEAVWLERGPLEPSEPAVVAAARVGVGHAGEWARKPLRFYVRGSPWVSVVDRVAEQDTQA

SEQ ID NO: 21 - protein, 1743 aa, synthetic construct
MKRTADGSEFESPKKKRKVSGGSDKKYSIGLAIGTNSVGWAVITDEYKVPSKKFKVLGNTDRHSIKKNLIGALLFDSGETAEATRLKRTARRRYTRRKNRICYLQEIFSNEMAKVDDSFFHRLEESFLVEEDKKHERHPIFGNIVDEVAYHEKYPTIYHLRKKLVDSTDKADLRLIYLALAHMIKFRGHFLIEGDLNPDNSDVDKLFIQLVQTYNQLFEENPINASGVDAKAILSARLSKSRRLENLIAQLPGEKKNGLFGNLIALSLGLTPNFKSNFDLAEDAKLQLSKDTYDDDLDNLLAQIGDQYADLFLAAKNLSDAILLSDILRVNTEITKAPLSASMIKRYDEHHQDLTLLKALVRQQLPEKYKEIFFDQSKNGYAGYIDGGASQEEFYKFIKPILEKMDGTEELLVKLNREDLLRKQRTFDNGSIPHQIHLGELHAILRRQEDFYPFLKDNREKIEKILTFRIPYYVGPLARGNSRFAWMTRKSEETITPWNFEEVVDKGASAQSFIERMTNFDKNLPNEKVLPKHSLLYEYFTVYNELTKVKYVTEGMRKPAFLSGEQKKAIVDLLFKTNRKVTVKQLKEDYFKKIECFDSVEISGVEDRFNASLGTYHDLLKIIKDKDFLDNEENEDILEDIVLTLTLFEDREMIEERLKTYAHLFDDKVMKQLKRRRYTGWGRLSRKLINGIRDKQSGKTILDFLKSDGFANRNFMQLIHDDSLTFKEDIQKAQVSGQGDSLHEHIANLAGSPAIKKGILQTVKVVDELVKVMGRHKPENIVIEMARENQTTQKGQKNSRERMKRIEEGIKELGSQILKEHPVENTQLQNEKLYLYYLQNGRDMYVDQELDINRLSDYDVDHIVPQSFLKDDSIDNKVLTRSDKNRGKSDNVPSEEVVKKMKNYWRQLLNAKLITQRKFDNLTKAERGGLSELDKAGFIKRQLVETRQITKHVAQILDSRMNTKYDENDKLIREVKVITLKSKLVSDFRKDFQFYKVREINNYHHAHDAYLNAVVGTALIKKYPKLESEFVYGDYKVYDVRKMIAKSEQEIGKATAKYFFYSNIMNFFKTEITLANGEIRKRPLIETNGETGEIVWDKGRDFATVRKVLSMPQVNIVKKTEVQTGGFSKESILPKRNSDKLIARKKDWDPKKYGGFDSPTVAYSVLVVAKVEKGKSKKLKSVKELLGITIMERSSFEKNPIDFLEAKGYKEVKKDLIIKLPKYSLFELENGRKRMLASAGELQKGNELALPSKYVNFLYLASHYEKLKGSPEDNEQKQLFVEQHKHYLDEIIEQISEFSKRVILADANLDKVLSAYNKHRDKPIREQAENIIHLFTLTNLGAPAAFKYFDTTIDRKRYTSTKEVLDATLIHQSITGLYETRIDLSQLGGDSGGSKRTADGSEFEPKKKRKVLGGDSGGSGGSGGSVTPALQMKKPKQFCRRMGQKKQRPARAGQPHSSSDAAQAPAEQPHSSSDAAQAPCPRERCLGPPTTPGPYRSIYFSSPKGHLTRLGLEFFDQPAVPLARAFLGQVLVRRLPNGTELRGRIVETEAYLGPEDEAAHSRGGRQTPRNRGMFMKPGTLYVYIIYRMYFCMSISSQGDGANVLLRALEPLEGLETMRQLRATLRAATAARVLADRELCSGPSKLCQALAINKSFDQRDLAQDEAVWLERGPLEPSEPAVVAAARVGVGHAGEWARKPLRFYVRGSPWVSVVDRVAEQDTQASGGSKRTADGSEFEPKKKRKV

SEQ ID NO: 22 - protein, 297 aa, synthetic construct
VTPALQMKKPKQFCRRMGQKKQRPARAGQPHSSSDAAQAPAEQPHSSSDAAQAPCPRERCLGPPTTPGPYRSIYFSSPKGHLTRLGLEFFDQPAVPLARAFLGQVLVRRLPNGTELRGRIVETEAYLGPEDEAAHSRGGRQTPRNRGMFMKPGTLYVYIIYRMYFCMSISSQGRGANVLLRALEPLEGLETMRQLRATLRAATAARVLADRELCSGPSKLCQALAINKSFDQRDLAQDEAVWLERGPLEPSEPAVVAAARVGVGHAGEWARKPLRFYVRGSPWVSVVDRVAEQDTQA

SEQ ID NO: 23 - protein, 1743 aa, synthetic construct
MKRTADGSEFESPKKKRKVSGGSDKKYSIGLAIGTNSVGWAVITDEYKVPSKKFKVLGNTDRHSIKKNLIGALLFDSGETAEATRLKRTARRRYTRRKNRICYLQEIFSNEMAKVDDSFFHRLEESFLVEEDKKHERHPIFGNIVDEVAYHEKYPTIYHLRKKLVDSTDKADLRLIYLALAHMIKFRGHFLIEGDLNPDNSDVDKLFIQLVQTYNQLFEENPINASGVDAKAILSARLSKSRRLENLIAQLPGEKKNGLFGNLIALSLGLTPNFKSNFDLAEDAKLQLSKDTYDDDLDNLLAQIGDQYADLFLAAKNLSDAILLSDILRVNTEITKAPLSASMIKRYDEHHQDLTLLKALVRQQLPEKYKEIFFDQSKNGYAGYIDGGASQEEFYKFIKPILEKMDGTEELLVKLNREDLLRKQRTFDNGSIPHQIHLGELHAILRRQEDFYPFLKDNREKIEKILTFRIPYYVGPLARGNSRFAWMTRKSEETITPWNFEEVVDKGASAQSFIERMTNFDKNLPNEKVLPKHSLLYEYFTVYNELTKVKYVTEGMRKPAFLSGEQKKAIVDLLFKTNRKVTVKQLKEDYFKKIECFDSVEISGVEDRFNASLGTYHDLLKIIKDKDFLDNEENEDILEDIVLTLTLFEDREMIEERLKTYAHLFDDKVMKQLKRRRYTGWGRLSRKLINGIRDKQSGKTILDFLKSDGFANRNFMQLIHDDSLTFKEDIQKAQVSGQGDSLHEHIANLAGSPAIKKGILQTVKVVDELVKVMGRHKPENIVIEMARENQTTQKGQKNSRERMKRIEEGIKELGSQILKEHPVENTQLQNEKLYLYYLQNGRDMYVDQELDINRLSDYDVDHIVPQSFLKDDSIDNKVLTRSDKNRGKSDNVPSEEVVKKMKNYWRQLLNAKLITQRKFDNLTKAERGGLSELDKAGFIKRQLVETRQITKHVAQILDSRMNTKYDENDKLIREVKVITLKSKLVSDFRKDFQFYKVREINNYHHAHDAYLNAVVGTALIKKYPKLESEFVYGDYKVYDVRKMIAKSEQEIGKATAKYFFYSNIMNFFKTEITLANGEIRKRPLIETNGETGEIVWDKGRDFATVRKVLSMPQVNIVKKTEVQTGGFSKESILPKRNSDKLIARKKDWDPKKYGGFDSPTVAYSVLVVAKVEKGKSKKLKSVKELLGITIMERSSFEKNPIDFLEAKGYKEVKKDLIIKLPKYSLFELENGRKRMLASAGELQKGNELALPSKYVNFLYLASHYEKLKGSPEDNEQKQLFVEQHKHYLDEIIEQISEFSKRVILADANLDKVLSAYNKHRDKPIREQAENIIHLFTLTNLGAPAAFKYFDTTIDRKRYTSTKEVLDATLIHQSITGLYETRIDLSQLGGDSGGSKRTADGSEFEPKKKRKVLGGDSGGSGGSGGSVTPALQMKKPKQFCRRMGQKKQRPARAGQPHSSSDAAQAPAEQPHSSSDAAQAPCPRERCLGPPTTPGPYRSIYFSSPKGHLTRLGLEFFDQPAVPLARAFLGQVLVRRLPNGTELRGRIVETEAYLGPEDEAAHSRGGRQTPRNRGMFMKPGTLYVYIIYRMYFCMSISSQGRGANVLLRALEPLEGLETMRQLRATLRAATAARVLADRELCSGPSKLCQALAINKSFDQRDLAQDEAVWLERGPLEPSEPAVVAAARVGVGHAGEWARKPLRFYVRGSPWVSVVDRVAEQDTQASGGSKRTADGSEFEPKKKRKV

SEQ ID NO: 24 - protein, 297 aa, synthetic construct
VTPALQMKKPKQFCRRMGQKKQRPARAGQPHSSSDAAQAPAEQPHSSSDAAQAPCPRERCLGPPTTPGPYRSIYFSSPKGHLTRLGLEFFDQPAVPLARAFLGQVLVRRLPNGTELRGRIVETEAYLGPEDEAAHSRGGRQTPRNRGMFMKPGTLYVYIIYRMYFCMSVSSQGRGANVLLRALEPLEGLETMRQLRATLRAATAARVLADRELCSGPSKLCQALAINKSFDQRDLAQDEAVWLERGPLEPSEPAVVAAARVGVGHAGEWARKPLRFYVRGSPWVSVVDRVAEQDTQA

SEQ ID NO: 25 - protein, 1743 aa, synthetic construct
MKRTADGSEFESPKKKRKVSGGSDKKYSIGLAIGTNSVGWAVITDEYKVPSKKFKVLGNTDRHSIKKNLIGALLFDSGETAEATRLKRTARRRYTRRKNRICYLQEIFSNEMAKVDDSFFHRLEESFLVEEDKKHERHPIFGNIVDEVAYHEKYPTIYHLRKKLVDSTDKADLRLIYLALAHMIKFRGHFLIEGDLNPDNSDVDKLFIQLVQTYNQLFEENPINASGVDAKAILSARLSKSRRLENLIAQLPGEKKNGLFGNLIALSLGLTPNFKSNFDLAEDAKLQLSKDTYDDDLDNLLAQIGDQYADLFLAAKNLSDAILLSDILRVNTEITKAPLSASMIKRYDEHHQDLTLLKALVRQQLPEKYKEIFFDQSKNGYAGYIDGGASQEEFYKFIKPILEKMDGTEELLVKLNREDLLRKQRTFDNGSIPHQIHLGELHAILRRQEDFYPFLKDNREKIEKILTFRIPYYVGPLARGNSRFAWMTRKSEETITPWNFEEVVDKGASAQSFIERMTNFDKNLPNEKVLPKHSLLYEYFTVYNELTKVKYVTEGMRKPAFLSGEQKKAIVDLLFKTNRKVTVKQLKEDYFKKIECFDSVEISGVEDRFNASLGTYHDLLKIIKDKDFLDNEENEDILEDIVLTLTLFEDREMIEERLKTYAHLFDDKVMKQLKRRRYTGWGRLSRKLINGIRDKQSGKTILDFLKSDGFANRNFMQLIHDDSLTFKEDIQKAQVSGQGDSLHEHIANLAGSPAIKKGILQTVKVVDELVKVMGRHKPENIVIEMARENQTTQKGQKNSRERMKRIEEGIKELGSQILKEHPVENTQLQNEKLYLYYLQNGRDMYVDQELDINRLSDYDVDHIVPQSFLKDDSIDNKVLTRSDKNRGKSDNVPSEEVVKKMKNYWRQLLNAKLITQRKFDNLTKAERGGLSELDKAGFIKRQLVETRQITKHVAQILDSRMNTKYDENDKLIREVKVITLKSKLVSDFRKDFQFYKVREINNYHHAHDAYLNAVVGTALIKKYPKLESEFVYGDYKVYDVRKMIAKSEQEIGKATAKYFFYSNIMNFFKTEITLANGEIRKRPLIETNGETGEIVWDKGRDFATVRKVLSMPQVNIVKKTEVQTGGFSKESILPKRNSDKLIARKKDWDPKKYGGFDSPTVAYSVLVVAKVEKGKSKKLKSVKELLGITIMERSSFEKNPIDFLEAKGYKEVKKDLIIKLPKYSLFELENGRKRMLASAGELQKGNELALPSKYVNFLYLASHYEKLKGSPEDNEQKQLFVEQHKHYLDEIIEQISEFSKRVILADANLDKVLSAYNKHRDKPIREQAENIIHLFTLTNLGAPAAFKYFDTTIDRKRYTSTKEVLDATLIHQSITGLYETRIDLSQLGGDSGGSKRTADGSEFEPKKKRKVLGGDSGGSGGSGGSVTPALQMKKPKQFCRRMGQKKQRPARAGQPHSSSDAAQAPAEQPHSSSDAAQAPCPRERCLGPPTTPGPYRSIYFSSPKGHLTRLGLEFFDQPAVPLARAFLGQVLVRRLPNGTELRGRIVETEAYLGPEDEAAHSRGGRQTPRNRGMFMKPGTLYVYIIYRMYFCMSVSSQGRGANVLLRALEPLEGLETMRQLRATLRAATAARVLADRELCSGPSKLCQALAINKSFDQRDLAQDEAVWLERGPLEPSEPAVVAAARVGVGHAGEWARKPLRFYVRGSPWVSVVDRVAEQDTQASGGSKRTADGSEFEPKKKRKV

SEQ ID NO: 26 - protein, 297 aa, synthetic construct
VTPALQMKKPKQFCRRMGQKKQRPARAGQPHSSSDAAQAPAEQPHSSSDAAQAPCPRERCLGPPTTPGPYRSIYFSSPKGHLTRLGLEFFDQPAVPLARAFLGQVLVRRLPNGTELRGRIVETEAYLGPEDEAAHSRGGRQTPRNRGMFMKPGTLYVYIIYRMYFCMGISSQGRGANVLLRALEPLEGLETMRQLRATLRAATAARVLADRELCSGPSKLCQALAINKSFDQRDLAQDEAVWLERGPLEPSEPAVVAAARVGVGHAGEWARKPLRFYVRGSPWVSVVDRVAEQDTQA

SEQ ID NO: 27 - protein, 1743 aa, synthetic construct
MKRTADGSEFESPKKKRKVSGGSDKKYSIGLAIGTNSVGWAVITDEYKVPSKKFKVLGNTDRHSIKKNLIGALLFDSGETAEATRLKRTARRRYTRRKNRICYLQEIFSNEMAKVDDSFFHRLEESFLVEEDKKHERHPIFGNIVDEVAYHEKYPTIYHLRKKLVDSTDKADLRLIYLALAHMIKFRGHFLIEGDLNPDNSDVDKLFIQLVQTYNQLFEENPINASGVDAKAILSARLSKSRRLENLIAQLPGEKKNGLFGNLIALSLGLTPNFKSNFDLAEDAKLQLSKDTYDDDLDNLLAQIGDQYADLFLAAKNLSDAILLSDILRVNTEITKAPLSASMIKRYDEHHQDLTLLKALVRQQLPEKYKEIFFDQSKNGYAGYIDGGASQEEFYKFIKPILEKMDGTEELLVKLNREDLLRKQRTFDNGSIPHQIHLGELHAILRRQEDFYPFLKDNREKIEKILTFRIPYYVGPLARGNSRFAWMTRKSEETITPWNFEEVVDKGASAQSFIERMTNFDKNLPNEKVLPKHSLLYEYFTVYNELTKVKYVTEGMRKPAFLSGEQKKAIVDLLFKTNRKVTVKQLKEDYFKKIECFDSVEISGVEDRFNASLGTYHDLLKIIKDKDFLDNEENEDILEDIVLTLTLFEDREMIEERLKTYAHLFDDKVMKQLKRRRYTGWGRLSRKLINGIRDKQSGKTILDFLKSDGFANRNFMQLIHDDSLTFKEDIQKAQVSGQGDSLHEHIANLAGSPAIKKGILQTVKVVDELVKVMGRHKPENIVIEMARENQTTQKGQKNSRERMKRIEEGIKELGSQILKEHPVENTQLQNEKLYLYYLQNGRDMYVDQELDINRLSDYDVDHIVPQSFLKDDSIDNKVLTRSDKNRGKSDNVPSEEVVKKMKNYWRQLLNAKLITQRKFDNLTKAERGGLSELDKAGFIKRQLVETRQITKHVAQILDSRMNTKYDENDKLIREVKVITLKSKLVSDFRKDFQFYKVREINNYHHAHDAYLNAVVGTALIKKYPKLESEFVYGDYKVYDVRKMIAKSEQEIGKATAKYFFYSNIMNFFKTEITLANGEIRKRPLIETNGETGEIVWDKGRDFATVRKVLSMPQVNIVKKTEVQTGGFSKESILPKRNSDKLIARKKDWDPKKYGGFDSPTVAYSVLVVAKVEKGKSKKLKSVKELLGITIMERSSFEKNPIDFLEAKGYKEVKKDLIIKLPKYSLFELENGRKRMLASAGELQKGNELALPSKYVNFLYLASHYEKLKGSPEDNEQKQLFVEQHKHYLDEIIEQISEFSKRVILADANLDKVLSAYNKHRDKPIREQAENIIHLFTLTNLGAPAAFKYFDTTIDRKRYTSTKEVLDATLIHQSITGLYETRIDLSQLGGDSGGSKRTADGSEFEPKKKRKVLGGDSGGSGGSGGSVTPALQMKKPKQFCRRMGQKKQRPARAGQPHSSSDAAQAPAEQPHSSSDAAQAPCPRERCLGPPTTPGPYRSIYFSSPKGHLTRLGLEFFDQPAVPLARAFLGQVLVRRLPNGTELRGRIVETEAYLGPEDEAAHSRGGRQTPRNRGMFMKPGTLYVYIIYRMYFCMGISSQGRGANVLLRALEPLEGLETMRQLRATLRAATAARVLADRELCSGPSKLCQALAINKSFDQRDLAQDEAVWLERGPLEPSEPAVVAAARVGVGHAGEWARKPLRFYVRGSPWVSVVDRVAEQDTQASGGSKRTADGSEFEPKKKRKV

SEQ ID NO: 28 - protein, 297 aa, synthetic construct
VTPALQMKKPKQFCRRMGQKKQRPARAGQPHSSSDAAQAPAEQPHSSSDAAQAPCPRERCLGPPTTPGPYRSIYFSSPKGHLTRLGLEFFDQPAVPLARAFLGQVLVRRLPNGTELRGRIVETEAYLGPEDEAAHSRGGRQTPRNRGMFMKPGTLYVYIIYYMYFCMSISSQGRGANVLLRALEPLEGLETMRQLRATLRAATAARVLADRELCSGPSKLCQALAINKSFDQRDLAQDEAVWLERGPLEPSEPAVVAAARVGVGHAGEWARKPLRFYVRGSPWVSVVDRVAEQDTQA

SEQ ID NO: 29 - protein, 1743 aa, synthetic construct
MKRTADGSEFESPKKKRKVSGGSDKKYSIGLAIGTNSVGWAVITDEYKVPSKKFKVLGNTDRHSIKKNLIGALLFDSGETAEATRLKRTARRRYTRRKNRICYLQEIFSNEMAKVDDSFFHRLEESFLVEEDKKHERHPIFGNIVDEVAYHEKYPTIYHLRKKLVDSTDKADLRLIYLALAHMIKFRGHFLIEGDLNPDNSDVDKLFIQLVQTYNQLFEENPINASGVDAKAILSARLSKSRRLENLIAQLPGEKKNGLFGNLIALSLGLTPNFKSNFDLAEDAKLQLSKDTYDDDLDNLLAQIGDQYADLFLAAKNLSDAILLSDILRVNTEITKAPLSASMIKRYDEHHQDLTLLKALVRQQLPEKYKEIFFDQSKNGYAGYIDGGASQEEFYKFIKPILEKMDGTEELLVKLNREDLLRKQRTFDNGSIPHQIHLGELHAILRRQEDFYPFLKDNREKIEKILTFRIPYYVGPLARGNSRFAWMTRKSEETITPWNFEEVVDKGASAQSFIERMTNFDKNLPNEKVLPKHSLLYEYFTVYNELTKVKYVTEGMRKPAFLSGEQKKAIVDLLFKTNRKVTVKQLKEDYFKKIECFDSVEISGVEDRFNASLGTYHDLLKIIKDKDFLDNEENEDILEDIVLTLTLFEDREMIEERLKTYAHLFDDKVMKQLKRRRYTGWGRLSRKLINGIRDKQSGKTILDFLKSDGFANRNFMQLIHDDSLTFKEDIQKAQVSGQGDSLHEHIANLAGSPAIKKGILQTVKVVDELVKVMGRHKPENIVIEMARENQTTQKGQKNSRERMKRIEEGIKELGSQILKEHPVENTQLQNEKLYLYYLQNGRDMYVDQELDINRLSDYDVDHIVPQSFLKDDSIDNKVLTRSDKNRGKSDNVPSEEVVKKMKNYWRQLLNAKLITQRKFDNLTKAERGGLSELDKAGFIKRQLVETRQITKHVAQILDSRMNTKYDENDKLIREVKVITLKSKLVSDFRKDFQFYKVREINNYHHAHDAYLNAVVGTALIKKYPKLESEFVYGDYKVYDVRKMIAKSEQEIGKATAKYFFYSNIMNFFKTEITLANGEIRKRPLIETNGETGEIVWDKGRDFATVRKVLSMPQVNIVKKTEVQTGGFSKESILPKRNSDKLIARKKDWDPKKYGGFDSPTVAYSVLVVAKVEKGKSKKLKSVKELLGITIMERSSFEKNPIDFLEAKGYKEVKKDLIIKLPKYSLFELENGRKRMLASAGELQKGNELALPSKYVNFLYLASHYEKLKGSPEDNEQKQLFVEQHKHYLDEIIEQISEFSKRVILADANLDKVLSAYNKHRDKPIREQAENIIHLFTLTNLGAPAAFKYFDTTIDRKRYTSTKEVLDATLIHQSITGLYETRIDLSQLGGDSGGSKRTADGSEFEPKKKRKVLGGDSGGSGGSGGSVTPALQMKKPKQFCRRMGQKKQRPARAGQPHSSSDAAQAPAEQPHSSSDAAQAPCPRERCLGPPTTPGPYRSIYFSSPKGHLTRLGLEFFDQPAVPLARAFLGQVLVRRLPNGTELRGRIVETEAYLGPEDEAAHSRGGRQTPRNRGMFMKPGTLYVYIIYYMYFCMSISSQGRGANVLLRALEPLEGLETMRQLRATLRAATAARVLADRELCSGPSKLCQALAINKSFDQRDLAQDEAVWLERGPLEPSEPAVVAAARVGVGHAGEWARKPLRFYVRGSPWVSVVDRVAEQDTQASGGSKRTADGSEFEPKKKRKV

SEQ ID NO: 30 - protein, 297 aa, synthetic construct
VTPALQMKKPKQFCRRMGQKKQRPARAGQPHSSSDAAQAPAEQPHSSSDAAQAPCPRERCLGPPTTPGPYRSIYFSSPKGHLTRLGLEFFDQPAVPLARAFLGQVLVRRLPNGTELRGRIVETEAYLGPEDEAAHSRGGRQTPRNRGMFMKPGTLYVYIIYRMYFCMGVSSQGRGANVLLRALEPLEGLETMRQLRATLRAATAARVLADRELCSGPSKLCQALAINKSFDQRDLAQDEAVWLERGPLEPSEPAVVAAARVGVGHAGEWARKPLRFYVRGSPWVSVVDRVAEQDTQA

SEQ ID NO: 31 - protein, 1743 aa, synthetic construct
MKRTADGSEFESPKKKRKVSGGSDKKYSIGLAIGTNSVGWAVITDEYKVPSKKFKVLGNTDRHSIKKNLIGALLFDSGETAEATRLKRTARRRYTRRKNRICYLQEIFSNEMAKVDDSFFHRLEESFLVEEDKKHERHPIFGNIVDEVAYHEKYPTIYHLRKKLVDSTDKADLRLIYLALAHMIKFRGHFLIEGDLNPDNSDVDKLFIQLVQTYNQLFEENPINASGVDAKAILSARLSKSRRLENLIAQLPGEKKNGLFGNLIALSLGLTPNFKSNFDLAEDAKLQLSKDTYDDDLDNLLAQIGDQYADLFLAAKNLSDAILLSDILRVNTEITKAPLSASMIKRYDEHHQDLTLLKALVRQQLPEKYKEIFFDQSKNGYAGYIDGGASQEEFYKFIKPILEKMDGTEELLVKLNREDLLRKQRTFDNGSIPHQIHLGELHAILRRQEDFYPFLKDNREKIEKILTFRIPYYVGPLARGNSRFAWMTRKSEETITPWNFEEVVDKGASAQSFIERMTNFDKNLPNEKVLPKHSLLYEYFTVYNELTKVKYVTEGMRKPAFLSGEQKKAIVDLLFKTNRKVTVKQLKEDYFKKIECFDSVEISGVEDRFNASLGTYHDLLKIIKDKDFLDNEENEDILEDIVLTLTLFEDREMIEERLKTYAHLFDDKVMKQLKRRRYTGWGRLSRKLINGIRDKQSGKTILDFLKSDGFANRNFMQLIHDDSLTFKEDIQKAQVSGQGDSLHEHIANLAGSPAIKKGILQTVKVVDELVKVMGRHKPENIVIEMARENQTTQKGQKNSRERMKRIEEGIKELGSQILKEHPVENTQLQNEKLYLYYLQNGRDMYVDQELDINRLSDYDVDHIVPQSFLKDDSIDNKVLTRSDKNRGKSDNVPSEEVVKKMKNYWRQLLNAKLITQRKFDNLTKAERGGLSELDKAGFIKRQLVETRQITKHVAQILDSRMNTKYDENDKLIREVKVITLKSKLVSDFRKDFQFYKVREINNYHHAHDAYLNAVVGTALIKKYPKLESEFVYGDYKVYDVRKMIAKSEQEIGKATAKYFFYSNIMNFFKTEITLANGEIRKRPLIETNGETGEIVWDKGRDFATVRKVLSMPQVNIVKKTEVQTGGFSKESILPKRNSDKLIARKKDWDPKKYGGFDSPTVAYSVLVVAKVEKGKSKKLKSVKELLGITIMERSSFEKNPIDFLEAKGYKEVKKDLIIKLPKYSLFELENGRKRMLASAGELQKGNELALPSKYVNFLYLASHYEKLKGSPEDNEQKQLFVEQHKHYLDEIIEQISEFSKRVILADANLDKVLSAYNKHRDKPIREQAENIIHLFTLTNLGAPAAFKYFDTTIDRKRYTSTKEVLDATLIHQSITGLYETRIDLSQLGGDSGGSKRTADGSEFEPKKKRKVLGGDSGGSGGSGGSVTPALQMKKPKQFCRRMGQKKQRPARAGQPHSSSDAAQAPAEQPHSSSDAAQAPCPRERCLGPPTTPGPYRSIYFSSPKGHLTRLGLEFFDQPAVPLARAFLGQVLVRRLPNGTELRGRIVETEAYLGPEDEAAHSRGGRQTPRNRGMFMKPGTLYVYIIYRMYFCMGVSSQGRGANVLLRALEPLEGLETMRQLRATLRAATAARVLADRELCSGPSKLCQALAINKSFDQRDLAQDEAVWLERGPLEPSEPAVVAAARVGVGHAGEWARKPLRFYVRGSPWVSVVDRVAEQDTQASGGSKRTADGSEFEPKKKRKV

SEQ ID NO: 32 - protein, 297 aa, synthetic construct
VTPALQMKKPKQFCRRMGQKKQRPARAGQPHSSSDAAQAPAEQPHSSSDAAQAPCPRERCLGPPTTPGPYRSIYFSSPKGHLTRLGLEFFDQPAVPLARAFLGQVLVRRLPNGTELRGRIVETEAYLGPEDEAAHSRGGRQTPRNRGMFMKPGTLYVYIIYYMYFCMGVSSQGRGANVLLRALEPLEGLETMRQLRATLRAATAARVLADRELCSGPSKLCQALAINKSFDQRDLAQDEAVWLERGPLEPSEPAVVAAARVGVGHAGEWARKPLRFYVRGSPWVSVVDRVAEQDTQA

SEQ ID NO: 33 - protein, 1743 aa, synthetic construct
MKRTADGSEFESPKKKRKVSGGSDKKYSIGLAIGTNSVGWAVITDEYKVPSKKFKVLGNTDRHSIKKNLIGALLFDSGETAEATRLKRTARRRYTRRKNRICYLQEIFSNEMAKVDDSFFHRLEESFLVEEDKKHERHPIFGNIVDEVAYHEKYPTIYHLRKKLVDSTDKADLRLIYLALAHMIKFRGHFLIEGDLNPDNSDVDKLFIQLVQTYNQLFEENPINASGVDAKAILSARLSKSRRLENLIAQLPGEKKNGLFGNLIALSLGLTPNFKSNFDLAEDAKLQLSKDTYDDDLDNLLAQIGDQYADLFLAAKNLSDAILLSDILRVNTEITKAPLSASMIKRYDEHHQDLTLLKALVRQQLPEKYKEIFFDQSKNGYAGYIDGGASQEEFYKFIKPILEKMDGTEELLVKLNREDLLRKQRTFDNGSIPHQIHLGELHAILRRQEDFYPFLKDNREKIEKILTFRIPYYVGPLARGNSRFAWMTRKSEETITPWNFEEVVDKGASAQSFIERMTNFDKNLPNEKVLPKHSLLYEYFTVYNELTKVKYVTEGMRKPAFLSGEQKKAIVDLLFKTNRKVTVKQLKEDYFKKIECFDSVEISGVEDRFNASLGTYHDLLKIIKDKDFLDNEENEDILEDIVLTLTLFEDREMIEERLKTYAHLFDDKVMKQLKRRRYTGWGRLSRKLINGIRDKQSGKTILDFLKSDGFANRNFMQLIHDDSLTFKEDIQKAQVSGQGDSLHEHIANLAGSPAIKKGILQTVKVVDELVKVMGRHKPENIVIEMARENQTTQKGQKNSRERMKRIEEGIKELGSQILKEHPVENTQLQNEKLYLYYLQNGRDMYVDQELDINRLSDYDVDHIVPQSFLKDDSIDNKVLTRSDKNRGKSDNVPSEEVVKKMKNYWRQLLNAKLITQRKFDNLTKAERGGLSELDKAGFIKRQLVETRQITKHVAQILDSRMNTKYDENDKLIREVKVITLKSKLVSDFRKDFQFYKVREINNYHHAHDAYLNAVVGTALIKKYPKLESEFVYGDYKVYDVRKMIAKSEQEIGKATAKYFFYSNIMNFFKTEITLANGEIRKRPLIETNGETGEIVWDKGRDFATVRKVLSMPQVNIVKKTEVQTGGFSKESILPKRNSDKLIARKKDWDPKKYGGFDSPTVAYSVLVVAKVEKGKSKKLKSVKELLGITIMERSSFEKNPIDFLEAKGYKEVKKDLIIKLPKYSLFELENGRKRMLASAGELQKGNELALPSKYVNFLYLASHYEKLKGSPEDNEQKQLFVEQHKHYLDEIIEQISEFSKRVILADANLDKVLSAYNKHRDKPIREQAENIIHLFTLTNLGAPAAFKYFDTTIDRKRYTSTKEVLDATLIHQSITGLYETRIDLSQLGGDSGGSKRTADGSEFEPKKKRKVLGGDSGGSGGSGGSVTPALQMKKPKQFCRRMGQKKQRPARAGQPHSSSDAAQAPAEQPHSSSDAAQAPCPRERCLGPPTTPGPYRSIYFSSPKGHLTRLGLEFFDQPAVPLARAFLGQVLVRRLPNGTELRGRIVETEAYLGPEDEAAHSRGGRQTPRNRGMFMKPGTLYVYIIYYMYFCMGVSSQGRGANVLLRALEPLEGLETMRQLRATLRAATAARVLADRELCSGPSKLCQALAINKSFDQRDLAQDEAVWLERGPLEPSEPAVVAAARVGVGHAGEWARKPLRFYVRGSPWVSVVDRVAEQDTQASGGSKRTADGSEFEPKKKRKV

SEQ ID NO: 34 - protein, 297 aa, synthetic construct
VTPALQMKKPKQFCRRMGQKKQRPARAGQPHSSSDAAQAPAEQPHSSSDAAQAPCPRERCLGPPTTPGPYRSIYFSSPKGHLTRLGLEFFDQPAVPLARAFLGQVLVRRLPNGTELRGRIVETEAYLGPEDEAAHSRGGRQTPRNRGMFMKPGTLYVYIIYRMYFCMGISSQGRGANVLLRALEPLEGLETMRQLRARLRAATAARVLADRELCSGPSKLCQALAINKSFDQRDLAQDEAVWLERGPLEPSEPAVVAAARVGVGHAGEWARKPLRFYVRGSPWVSVVDRVAEQDTQA

SEQ ID NO: 35 - protein, 1743 aa, synthetic construct
MKRTADGSEFESPKKKRKVSGGSDKKYSIGLAIGTNSVGWAVITDEYKVPSKKFKVLGNTDRHSIKKNLIGALLFDSGETAEATRLKRTARRRYTRRKNRICYLQEIFSNEMAKVDDSFFHRLEESFLVEEDKKHERHPIFGNIVDEVAYHEKYPTIYHLRKKLVDSTDKADLRLIYLALAHMIKFRGHFLIEGDLNPDNSDVDKLFIQLVQTYNQLFEENPINASGVDAKAILSARLSKSRRLENLIAQLPGEKKNGLFGNLIALSLGLTPNFKSNFDLAEDAKLQLSKDTYDDDLDNLLAQIGDQYADLFLAAKNLSDAILLSDILRVNTEITKAPLSASMIKRYDEHHQDLTLLKALVRQQLPEKYKEIFFDQSKNGYAGYIDGGASQEEFYKFIKPILEKMDGTEELLVKLNREDLLRKQRTFDNGSIPHQIHLGELHAILRRQEDFYPFLKDNREKIEKILTFRIPYYVGPLARGNSRFAWMTRKSEETITPWNFEEVVDKGASAQSFIERMTNFDKNLPNEKVLPKHSLLYEYFTVYNELTKVKYVTEGMRKPAFLSGEQKKAIVDLLFKTNRKVTVKQLKEDYFKKIECFDSVEISGVEDRFNASLGTYHDLLKIIKDKDFLDNEENEDILEDIVLTLTLFEDREMIEERLKTYAHLFDDKVMKQLKRRRYTGWGRLSRKLINGIRDKQSGKTILDFLKSDGFANRNFMQLIHDDSLTFKEDIQKAQVSGQGDSLHEHIANLAGSPAIKKGILQTVKVVDELVKVMGRHKPENIVIEMARENQTTQKGQKNSRERMKRIEEGIKELGSQILKEHPVENTQLQNEKLYLYYLQNGRDMYVDQELDINRLSDYDVDHIVPQSFLKDDSIDNKVLTRSDKNRGKSDNVPSEEVVKKMKNYWRQLLNAKLITQRKFDNLTKAERGGLSELDKAGFIKRQLVETRQITKHVAQILDSRMNTKYDENDKLIREVKVITLKSKLVSDFRKDFQFYKVREINNYHHAHDAYLNAVVGTALIKKYPKLESEFVYGDYKVYDVRKMIAKSEQEIGKATAKYFFYSNIMNFFKTEITLANGEIRKRPLIETNGETGEIVWDKGRDFATVRKVLSMPQVNIVKKTEVQTGGFSKESILPKRNSDKLIARKKDWDPKKYGGFDSPTVAYSVLVVAKVEKGKSKKLKSVKELLGITIMERSSFEKNPIDFLEAKGYKEVKKDLIIKLPKYSLFELENGRKRMLASAGELQKGNELALPSKYVNFLYLASHYEKLKGSPEDNEQKQLFVEQHKHYLDEIIEQISEFSKRVILADANLDKVLSAYNKHRDKPIREQAENIIHLFTLTNLGAPAAFKYFDTTIDRKRYTSTKEVLDATLIHQSITGLYETRIDLSQLGGDSGGSKRTADGSEFEPKKKRKVLGGDSGGSGGSGGSVTPALQMKKPKQFCRRMGQKKQRPARAGQPHSSSDAAQAPAEQPHSSSDAAQAPCPRERCLGPPTTPGPYRSIYFSSPKGHLTRLGLEFFDQPAVPLARAFLGQVLVRRLPNGTELRGRIVETEAYLGPEDEAAHSRGGRQTPRNRGMFMKPGTLYVYIIYRMYFCMGISSQGRGANVLLRALEPLEGLETMRQLRARLRAATAARVLADRELCSGPSKLCQALAINKSFDQRDLAQDEAVWLERGPLEPSEPAVVAAARVGVGHAGEWARKPLRFYVRGSPWVSVVDRVAEQDTQASGGSKRTADGSEFEPKKKRKV

SEQ ID NO: 36 - protein, 297 aa, synthetic construct
VTPALQMKKPKQFCRRMGQKKQRPARAGQPHSSSDAAQAPAEQPHSSSDAAQAPCPRERCLGPPTTPGPYRSIYFSSPKGHLTRLGLEFFDQPAVPLARAFLGQVLVRRLPNGTELRGRIVETEAYLGPEDEAAHSRGGRQTPRNRGMFMKPGTLYVYIIYRMYFCMGISSQGRGANVLLRALEPLEGLETMRQLRATLRAATAARVLADRELCSGPSKLCQALAINKRFDQRDLAQDEAVWLERGPLEPSEPAVVAAARVGVGHAGEWARKPLRFYVRGSPWVSVVDRVAEQDTQA

SEQ ID NO: 37 - protein, 1743 aa, synthetic construct
MKRTADGSEFESPKKKRKVSGGSDKKYSIGLAIGTNSVGWAVITDEYKVPSKKFKVLGNTDRHSIKKNLIGALLFDSGETAEATRLKRTARRRYTRRKNRICYLQEIFSNEMAKVDDSFFHRLEESFLVEEDKKHERHPIFGNIVDEVAYHEKYPTIYHLRKKLVDSTDKADLRLIYLALAHMIKFRGHFLIEGDLNPDNSDVDKLFIQLVQTYNQLFEENPINASGVDAKAILSARLSKSRRLENLIAQLPGEKKNGLFGNLIALSLGLTPNFKSNFDLAEDAKLQLSKDTYDDDLDNLLAQIGDQYADLFLAAKNLSDAILLSDILRVNTEITKAPLSASMIKRYDEHHQDLTLLKALVRQQLPEKYKEIFFDQSKNGYAGYIDGGASQEEFYKFIKPILEKMDGTEELLVKLNREDLLRKQRTFDNGSIPHQIHLGELHAILRRQEDFYPFLKDNREKIEKILTFRIPYYVGPLARGNSRFAWMTRKSEETITPWNFEEVVDKGASAQSFIERMTNFDKNLPNEKVLPKHSLLYEYFTVYNELTKVKYVTEGMRKPAFLSGEQKKAIVDLLFKTNRKVTVKQLKEDYFKKIECFDSVEISGVEDRFNASLGTYHDLLKIIKDKDFLDNEENEDILEDIVLTLTLFEDREMIEERLKTYAHLFDDKVMKQLKRRRYTGWGRLSRKLINGIRDKQSGKTILDFLKSDGFANRNFMQLIHDDSLTFKEDIQKAQVSGQGDSLHEHIANLAGSPAIKKGILQTVKVVDELVKVMGRHKPENIVIEMARENQTTQKGQKNSRERMKRIEEGIKELGSQILKEHPVENTQLQNEKLYLYYLQNGRDMYVDQELDINRLSDYDVDHIVPQSFLKDDSIDNKVLTRSDKNRGKSDNVPSEEVVKKMKNYWRQLLNAKLITQRKFDNLTKAERGGLSELDKAGFIKRQLVETRQITKHVAQILDSRMNTKYDENDKLIREVKVITLKSKLVSDFRKDFQFYKVREINNYHHAHDAYLNAVVGTALIKKYPKLESEFVYGDYKVYDVRKMIAKSEQEIGKATAKYFFYSNIMNFFKTEITLANGEIRKRPLIETNGETGEIVWDKGRDFATVRKVLSMPQVNIVKKTEVQTGGFSKESILPKRNSDKLIARKKDWDPKKYGGFDSPTVAYSVLVVAKVEKGKSKKLKSVKELLGITIMERSSFEKNPIDFLEAKGYKEVKKDLIIKLPKYSLFELENGRKRMLASAGELQKGNELALPSKYVNFLYLASHYEKLKGSPEDNEQKQLFVEQHKHYLDEIIEQISEFSKRVILADANLDKVLSAYNKHRDKPIREQAENIIHLFTLTNLGAPAAFKYFDTTIDRKRYTSTKEVLDATLIHQSITGLYETRIDLSQLGGDSGGSKRTADGSEFEPKKKRKVLGGDSGGSGGSGGSVTPALQMKKPKQFCRRMGQKKQRPARAGQPHSSSDAAQAPAEQPHSSSDAAQAPCPRERCLGPPTTPGPYRSIYFSSPKGHLTRLGLEFFDQPAVPLARAFLGQVLVRRLPNGTELRGRIVETEAYLGPEDEAAHSRGGRQTPRNRGMFMKPGTLYVYIIYRMYFCMGISSQGRGANVLLRALEPLEGLETMRQLRATLRAATAARVLADRELCSGPSKLCQALAINKRFDQRDLAQDEAVWLERGPLEPSEPAVVAAARVGVGHAGEWARKPLRFYVRGSPWVSVVDRVAEQDTQASGGSKRTADGSEFEPKKKRKV

SEQ ID NO: 38 - protein, 297 aa, synthetic construct
VTPALQMKKPKQFCRRMGQKKQRPARAGQPHSSSDAAQAPAEQPHSSSDAAQAPCPRERCLGPPTTPGPYRSIYFSSPKGHLTRLGLEFFDQPAVPLARAFLGQVLVRRLPNGTELRGRIVETEAYLGPEDEAAHSRGGRQTPRNRGMFMKPGTLYVYIIYRMYFCMGISSQGRGANVLLRALEPLEGLETMRQLRATLRAATAARVLADRELCSGPSKLCQALAINKSFDQRDLAQDEAVWLERGPLEPSEPAVVAAARVGVGHAGEWARKPLRFYVRGSPWVSVVDRVAEQRTQA

SEQ ID NO: 39 - protein, 1743 aa, synthetic construct
MKRTADGSEFESPKKKRKVSGGSDKKYSIGLAIGTNSVGWAVITDEYKVPSKKFKVLGNTDRHSIKKNLIGALLFDSGETAEATRLKRTARRRYTRRKNRICYLQEIFSNEMAKVDDSFFHRLEESFLVEEDKKHERHPIFGNIVDEVAYHEKYPTIYHLRKKLVDSTDKADLRLIYLALAHMIKFRGHFLIEGDLNPDNSDVDKLFIQLVQTYNQLFEENPINASGVDAKAILSARLSKSRRLENLIAQLPGEKKNGLFGNLIALSLGLTPNFKSNFDLAEDAKLQLSKDTYDDDLDNLLAQIGDQYADLFLAAKNLSDAILLSDILRVNTEITKAPLSASMIKRYDEHHQDLTLLKALVRQQLPEKYKEIFFDQSKNGYAGYIDGGASQEEFYKFIKPILEKMDGTEELLVKLNREDLLRKQRTFDNGSIPHQIHLGELHAILRRQEDFYPFLKDNREKIEKILTFRIPYYVGPLARGNSRFAWMTRKSEETITPWNFEEVVDKGASAQSFIERMTNFDKNLPNEKVLPKHSLLYEYFTVYNELTKVKYVTEGMRKPAFLSGEQKKAIVDLLFKTNRKVTVKQLKEDYFKKIECFDSVEISGVEDRFNASLGTYHDLLKIIKDKDFLDNEENEDILEDIVLTLTLFEDREMIEERLKTYAHLFDDKVMKQLKRRRYTGWGRLSRKLINGIRDKQSGKTILDFLKSDGFANRNFMQLIHDDSLTFKEDIQKAQVSGQGDSLHEHIANLAGSPAIKKGILQTVKVVDELVKVMGRHKPENIVIEMARENQTTQKGQKNSRERMKRIEEGIKELGSQILKEHPVENTQLQNEKLYLYYLQNGRDMYVDQELDINRLSDYDVDHIVPQSFLKDDSIDNKVLTRSDKNRGKSDNVPSEEVVKKMKNYWRQLLNAKLITQRKFDNLTKAERGGLSELDKAGFIKRQLVETRQITKHVAQILDSRMNTKYDENDKLIREVKVITLKSKLVSDFRKDFQFYKVREINNYHHAHDAYLNAVVGTALIKKYPKLESEFVYGDYKVYDVRKMIAKSEQEIGKATAKYFFYSNIMNFFKTEITLANGEIRKRPLIETNGETGEIVWDKGRDFATVRKVLSMPQVNIVKKTEVQTGGFSKESILPKRNSDKLIARKKDWDPKKYGGFDSPTVAYSVLVVAKVEKGKSKKLKSVKELLGITIMERSSFEKNPIDFLEAKGYKEVKKDLIIKLPKYSLFELENGRKRMLASAGELQKGNELALPSKYVNFLYLASHYEKLKGSPEDNEQKQLFVEQHKHYLDEIIEQISEFSKRVILADANLDKVLSAYNKHRDKPIREQAENIIHLFTLTNLGAPAAFKYFDTTIDRKRYTSTKEVLDATLIHQSITGLYETRIDLSQLGGDSGGSKRTADGSEFEPKKKRKVLGGDSGGSGGSGGSVTPALQMKKPKQFCRRMGQKKQRPARAGQPHSSSDAAQAPAEQPHSSSDAAQAPCPRERCLGPPTTPGPYRSIYFSSPKGHLTRLGLEFFDQPAVPLARAFLGQVLVRRLPNGTELRGRIVETEAYLGPEDEAAHSRGGRQTPRNRGMFMKPGTLYVYIIYRMYFCMGISSQGRGANVLLRALEPLEGLETMRQLRATLRAATAARVLADRELCSGPSKLCQALAINKSFDQRDLAQDEAVWLERGPLEPSEPAVVAAARVGVGHAGEWARKPLRFYVRGSPWVSVVDRVAEQRTQASGGSKRTADGSEFEPKKKRKV

SEQ ID NO: 40 - RNA, 76 nt, synthetic construct
  source 1..76: mol_type = other RNA
gttttagagctagaaatagcaagttaaaataaggctagtccgttatcaacttgaaaaagtggcaccgagtcggtgc

SEQ ID NO: 41 - DNA, 86 bp, synthetic construct
  source 1..86: mol_type = other DNA
gtgggtgagggcactccggttggggggtcttaagttgggcatttgtgggggtccttcagaattcagacctgtgtgtctccttgctg

SEQ ID NO: 42 - DNA, 86 bp, synthetic construct
  source 1..86: mol_type = other DNA
gtgggtgagggcactccggttggggggtcttaagttgggcatttgtgggggtccttcagaattcagacctgtgtgtctccttgccg

SEQ ID NO: 43 - DNA, 86 bp, synthetic construct
  source 1..86: mol_type = other DNA
ctgggtgagggcactccggttggggggtcttaagttgggcatttgtgggggtccttcagaattcagacctgtgtgtctccttgcag

SEQ ID NO: 44 - DNA, 86 bp, synthetic construct
  source 1..86: mol_type = other DNA
ttgggtgagggcactccggttggggggtcttaagttgggcatttgtgggggtccttcagaattcagagctgtgtgtctccttgcag

SEQ ID NO: 45 - DNA, 249 bp, synthetic construct
  source 1..249: mol_type = other DNA
gagggcctatttcccatgattccttcatatttgcatatacgatacaaggctgttagagagataattggaattaatttgactgtaaacacaaagatattagtacaaaatacgtgacgtagaaagtaataatttcttgggtagtttgcagttttaaaattatgttttaaaatggactatcatatgcttaccgtaacttgaaagtatttcgatttcttggctttatatatcttgtggaaaggacgaaacacc

SEQ ID NO: 46 - DNA, 1227 bp, synthetic construct
  source 1..1227: mol_type = other DNA
ggctccggtgcccgtcagtgggcagagcgcacatcgcccacagtccccgagaagttggggggaggggtcggcaattgaaccggtgcctagagaaggtggcgcggggtaaactgggaaagtgatgtcgtgtactggctccgcctttttcccgagggtgggggagaaccgtatataagtgcagtagtcgccgtgaacgttctttttcgcaacgggtttgccgccagaacacaggtaagtgccgtgtgtggttcccgcgggcctggcctctttacgggttatggcccttgcgtgccttgaattacttccacctggctgcagtacgtgattcttgatcccgagcttcgggttggaagtgggtgggagagttcgaggccttgcgcttaaggagccccttcgcctcgtgcttgagttgaggcctggcctgggcgctggggccgccgcgtgcgaatctggtggcaccttcgcgcctgtctcgctgctttcgataagtctctagccatttaaaatttttgatgacctgctgcgacgctttttttctggcaagatagtcttgtaaatgcgggccaagatctgcacactggtatttcggtttttggggccgcgggcggcgacggggcccgtgcgtcccagcgcacatgttcggcgaggcggggcctgcgagcgcggccaccgagaatcggacgggggtagtctcaagctggccggcctgctctggtgcctggcctcgcgccgccgtgtatcgccccgccctgggcggcaaggctggcccggtcggcaccagttgcgtgagcggaaagatggccgcttcccggccctgctgcagggagctcaaaatggaggacgcggcgctcgggagagcgggcgggtgagtcacccacacaaaggaaaagggcctttccgtcctcagccgtcgcttcatgtgactccacggagtaccgggcgccgtccaggcacctcgattagttctcgagcttttggagtacgtcgtctttaggttggggggaggggttttatgcgatggagtttccccacactgagtgggtggagactgaagttaggccagcttggcacttgatgtaattctccttggaatttgccctttttgagtttggatcttggttcattctcaagcctcagacagtggttcaaagtttttttcttccatttcaggtgtcgtgaggaattagcttggtactaatacgactcactatagggagagccgccacc

SEQ ID NO: 47 - DNA, 143 bp, synthetic construct
  source 1..143: mol_type = other DNA
acgcgtcgaacttgtttattgcagcttataatggttacaaataaagcaatagcatcacaaatttcacaaataaagcatttttttcactgcattctagttgtggtttgtccaaactcatcaatgtatcttatcatgtctggatc

SEQ ID NO: 48 - protein, 1367 aa, synthetic construct
DKKYSIGLAIGTNSVGWAVITDEYKVPSKKFKVLGNTDRHSIKKNLIGALLFDSGETAEATRLKRTARRRYTRRKNRICYLQEIFSNEMAKVDDSFFHRLEESFLVEEDKKHERHPIFGNIVDEVAYHEKYPTIYHLRKKLVDSTDKADLRLIYLALAHMIKFRGHFLIEGDLNPDNSDVDKLFIQLVQTYNQLFEENPINASGVDAKAILSARLSKSRRLENLIAQLPGEKKNGLFGNLIALSLGLTPNFKSNFDLAEDAKLQLSKDTYDDDLDNLLAQIGDQYADLFLAAKNLSDAILLSDILRVNTEITKAPLSASMIKRYDEHHQDLTLLKALVRQQLPEKYKEIFFDQSKNGYAGYIDGGASQEEFYKFIKPILEKMDGTEELLVKLNREDLLRKQRTFDNGSIPHQIHLGELHAILRRQEDFYPFLKDNREKIEKILTFRIPYYVGPLARGNSRFAWMTRKSEETITPWNFEEVVDKGASAQSFIERMTNFDKNLPNEKVLPKHSLLYEYFTVYNELTKVKYVTEGMRKPAFLSGEQKKAIVDLLFKTNRKVTVKQLKEDYFKKIECFDSVEISGVEDRFNASLGTYHDLLKIIKDKDFLDNEENEDILEDIVLTLTLFEDREMIEERLKTYAHLFDDKVMKQLKRRRYTGWGRLSRKLINGIRDKQSGKTILDFLKSDGFANRNFMQLIHDDSLTFKEDIQKAQVSGQGDSLHEHIANLAGSPAIKKGILQTVKVVDELVKVMGRHKPENIVIEMARENQTTQKGQKNSRERMKRIEEGIKELGSQILKEHPVENTQLQNEKLYLYYLQNGRDMYVDQELDINRLSDYDVDAIVPQSFLKDDSIDNKVLTRSDKNRGKSDNVPSEEVVKKMKNYWRQLLNAKLITQRKFDNLTKAERGGLSELDKAGFIKRQLVETRQITKHVAQILDSRMNTKYDENDKLIREVKVITLKSKLVSDFRKDFQFYKVREINNYHHAHDAYLNAVVGTALIKKYPKLESEFVYGDYKVYDVRKMIAKSEQEIGKATAKYFFYSNIMNFFKTEITLANGEIRKRPLIETNGETGEIVWDKGRDFATVRKVLSMPQVNIVKKTEVQTGGFSKESILPKRNSDKLIARKKDWDPKKYGGFDSPTVAYSVLVVAKVEKGKSKKLKSVKELLGITIMERSSFEKNPIDFLEAKGYKEVKKDLIIKLPKYSLFELENGRKRMLASAGELQKGNELALPSKYVNFLYLASHYEKLKGSPEDNEQKQLFVEQHKHYLDEIIEQISEFSKRVILADANLDKVLSAYNKHRDKPIREQAENIIHLFTLTNLGAPAAFKYFDTTIDRKRYTSTKEVLDATLIHQSITGLYETRIDLSQLGGD

SEQ ID NO: 49 - protein, 1743 aa, synthetic construct
MKRTADGSEFESPKKKRKVSGGSDKKYSIGLAIGTNSVGWAVITDEYKVPSKKFKVLGNTDRHSIKKNLIGALLFDSGETAEATRLKRTARRRYTRRKNRICYLQEIFSNEMAKVDDSFFHRLEESFLVEEDKKHERHPIFGNIVDEVAYHEKYPTIYHLRKKLVDSTDKADLRLIYLALAHMIKFRGHFLIEGDLNPDNSDVDKLFIQLVQTYNQLFEENPINASGVDAKAILSARLSKSRRLENLIAQLPGEKKNGLFGNLIALSLGLTPNFKSNFDLAEDAKLQLSKDTYDDDLDNLLAQIGDQYADLFLAAKNLSDAILLSDILRVNTEITKAPLSASMIKRYDEHHQDLTLLKALVRQQLPEKYKEIFFDQSKNGYAGYIDGGASQEEFYKFIKPILEKMDGTEELLVKLNREDLLRKQRTFDNGSIPHQIHLGELHAILRRQEDFYPFLKDNREKIEKILTFRIPYYVGPLARGNSRFAWMTRKSEETITPWNFEEVVDKGASAQSFIERMTNFDKNLPNEKVLPKHSLLYEYFTVYNELTKVKYVTEGMRKPAFLSGEQKKAIVDLLFKTNRKVTVKQLKEDYFKKIECFDSVEISGVEDRFNASLGTYHDLLKIIKDKDFLDNEENEDILEDIVLTLTLFEDREMIEERLKTYAHLFDDKVMKQLKRRRYTGWGRLSRKLINGIRDKQSGKTILDFLKSDGFANRNFMQLIHDDSLTFKEDIQKAQVSGQGDSLHEHIANLAGSPAIKKGILQTVKVVDELVKVMGRHKPENIVIEMARENQTTQKGQKNSRERMKRIEEGIKELGSQILKEHPVENTQLQNEKLYLYYLQNGRDMYVDQELDINRLSDYDVDAIVPQSFLKDDSIDNKVLTRSDKNRGKSDNVPSEEVVKKMKNYWRQLLNAKLITQRKFDNLTKAERGGLSELDKAGFIKRQLVETRQITKHVAQILDSRMNTKYDENDKLIREVKVITLKSKLVSDFRKDFQFYKVREINNYHHAHDAYLNAVVGTALIKKYPKLESEFVYGDYKVYDVRKMIAKSEQEIGKATAKYFFYSNIMNFFKTEITLANGEIRKRPLIETNGETGEIVWDKGRDFATVRKVLSMPQVNIVKKTEVQTGGFSKESILPKRNSDKLIARKKDWDPKKYGGFDSPTVAYSVLVVAKVEKGKSKKLKSVKELLGITIMERSSFEKNPIDFLEAKGYKEVKKDLIIKLPKYSLFELENGRKRMLASAGELQKGNELALPSKYVNFLYLASHYEKLKGSPEDNEQKQLFVEQHKHYLDEIIEQISEFSKRVILADANLDKVLSAYNKHRDKPIREQAENIIHLFTLTNLGAPAAFKYFDTTIDRKRYTSTKEVLDATLIHQSITGLYETRIDLSQLGGDSGGSKRTADGSEFEPKKKRKVLGGDSGGSGGSGGSVTPALQMKKPKQFCRRMGQKKQRPARAGQPHSSSDAAQAPAEQPHSSSDAAQAPCPRERCLGPPTTPGPYRSIYFSSPKGHLTRLGLEFFDQPAVPLARAFLGQVLVRRLPNGTELRGRIVETEAYLGPEDEAAHSRGGRQTPRNRGMFMKPGTLYVYIIYRMYFCMGISSQGRGANVLLRALEPLEGLETMRQLRATLRAATAARVLADRELCSGPSKLCQALAINKSFDQRDLAQDEAVWLERGPLEPSEPAVVAAARVGVGHAGEWARKPLRFYVRGSPWVSVVDRVAERDTQASGGSKRTADGSEFEPKKKRKV

SEQ ID NO: 50 - protein, 1080 aa, synthetic construct
MSSDVVRPYNTKLLPDNRKHNMFLQTFKRLNSISLNHFDLLICLYAAITNKKAEEYKSEKEAHVTADSLCAINWFRPMSKRYSKYATTTFNMLELFKEYSGHEPDAYSKNYLMSNIDSDRFVWVDCRKFAKDFAYQMELGFHEFTVLAETLLANSILVLNESTKANWAWGTVSALYGGGDKEDSTLKSKILLAFVDALNNHELKTKREILNQVCESLKYQSYQDMYVDFRSVVDENGNKKSPRGSMPIVTKFETDDLISDNQRKAMISNFTKNAAAKAAKKPIPYLDRLKEHMVSLCDEYNVYAWAAAITNSNADVTARNTRNLTFIGEQNSRRKRLSVLQTTTNEKAKDILNKINDNLIQEVRYTPAPKHLGRDLANLFDTLKEKDINNIENEEEKQNVINDCIEQYVDDCRSLNRNPIAALLKHISRYYEDFSAKNFLDGAKLNVLTEVVNRQKAHPTIWSEKAYTWISKFDKNRRQANSSLVGWVVPPEEVHKEKIAGQQSMMWVTLTLLDDGKWVKHHIPFSDSRYYSEVYAYNPNLPYLDGGIPRQSKFGNKPTTNLTAESQALLANSKYKKANKSFLRAKENATHNVRVSPNTSLCIRLLKDSAGNQMFDKIGNVLFGMQINHKITVGKPNYKIEVGDRFLGFDQNQSENHTYAVLQRVSESSHDTHHFNGWDVKVLEKGKVTSDVIVRDEVYDQLSYEGVPYDSSKFAEWRDKRRRFVLENLSIQLEEGKTFLTEFDKLNKDSLYRWNMNYLKLLRKAIRAGGKEFAKIAKTEIFELAVERFGPINLGSLSQISLKMIASFKGVVQSYFSVSGCVDDASKKAHDSMLFTFMCAAEEKRTNKREEKTNRAASFILQKAYLHGCKMIVCEDDLPVADGKTGKAQNADRMDRCARALAKKVNDGCVAMSICYRAIPAYMSSHQDPFVHMQDKKTSVLRPRFMEVNKDSIRDYHVAGLRRMLNSKSDAGTSVYYRQAALHFCEALGVSPELVKNKKTHAAELGKHMGSAMLMPWRGGRVYIASKKLTSDAKSVKYCGEDMWQYHADEIAAVNIAMYEVCCQTGAFGKKQKKSDELPG

SEQ ID NO: 51 - protein, 1456 aa, synthetic construct
MKRTADGSEFESPKKKRKVSGGSMSSDVVRPYNTKLLPDNRKHNMFLQTFKRLNSISLNHFDLLICLYAAITNKKAEEYKSEKEAHVTADSLCAINWFRPMSKRYSKYATTTFNMLELFKEYSGHEPDAYSKNYLMSNIDSDRFVWVDCRKFAKDFAYQMELGFHEFTVLAETLLANSILVLNESTKANWAWGTVSALYGGGDKEDSTLKSKILLAFVDALNNHELKTKREILNQVCESLKYQSYQDMYVDFRSVVDENGNKKSPRGSMPIVTKFETDDLISDNQRKAMISNFTKNAAAKAAKKPIPYLDRLKEHMVSLCDEYNVYAWAAAITNSNADVTARNTRNLTFIGEQNSRRKRLSVLQTTTNEKAKDILNKINDNLIQEVRYTPAPKHLGRDLANLFDTLKEKDINNIENEEEKQNVINDCIEQYVDDCRSLNRNPIAALLKHISRYYEDFSAKNFLDGAKLNVLTEVVNRQKAHPTIWSEKAYTWISKFDKNRRQANSSLVGWVVPPEEVHKEKIAGQQSMMWVTLTLLDDGKWVKHHIPFSDSRYYSEVYAYNPNLPYLDGGIPRQSKFGNKPTTNLTAESQALLANSKYKKANKSFLRAKENATHNVRVSPNTSLCIRLLKDSAGNQMFDKIGNVLFGMQINHKITVGKPNYKIEVGDRFLGFDQNQSENHTYAVLQRVSESSHDTHHFNGWDVKVLEKGKVTSDVIVRDEVYDQLSYEGVPYDSSKFAEWRDKRRRFVLENLSIQLEEGKTFLTEFDKLNKDSLYRWNMNYLKLLRKAIRAGGKEFAKIAKTEIFELAVERFGPINLGSLSQISLKMIASFKGVVQSYFSVSGCVDDASKKAHDSMLFTFMCAAEEKRTNKREEKTNRAASFILQKAYLHGCKMIVCEDDLPVADGKTGKAQNADRMDRCARALAKKVNDGCVAMSICYRAIPAYMSSHQDPFVHMQDKKTSVLRPRFMEVNKDSIRDYHVAGLRRMLNSKSDAGTSVYYRQAALHFCEALGVSPELVKNKKTHAAELGKHMGSAMLMPWRGGRVYIASKKLTSDAKSVKYCGEDMWQYHADEIAAVNIAMYEVCCQTGAFGKKQKKSDELPGSGGSKRTADGSEFEPKKKRKVLGGDSGGSGGSGGSVTPALQMKKPKQFCRRMGQKKQRPARAGQPHSSSDAAQAPAEQPHSSSDAAQAPCPRERCLGPPTTPGPYRSIYFSSPKGHLTRLGLEFFDQPAVPLARAFLGQVLVRRLPNGTELRGRIVETEAYLGPEDEAAHSRGGRQTPRNRGMFMKPGTLYVYIIYRMYFCMGISSQGRGANVLLRALEPLEGLETMRQLRATLRAATAARVLADRELCSGPSKLCQALAINKSFDQRDLAQDEAVWLERGPLEPSEPAVVAAARVGVGHAGEWARKPLRFYVRGSPWVSVVDRVAERDTQASGGSKRTADGSEFEPKKKRKV

SEQ ID NO: 52 - protein, 496 aa, synthetic construct
MMAVVYVISKSGKPLMPTTRCGHVRILLKEGKARVVERKPFTIQLTYESAEETQPLVLGIAPGRTNIGMSVVTESGESVFNAQIRTRNKDVPKLMKDRKQYRMAHRRLKRRCKRRRRAKAAGTAFEEGEKQRLLPGCFKPITCKSIRNKEARFNNRKRPVGWLTPTANHLLVTHLNVVKKVQKILPVAKVVLELNRFSFMAMNNPKVQRWQYQRGPLYGKGSVEEAVSMQQDGHCLFCKHGIDHYHHVVPRRKNGSETLENRVGLCEEHHRLVHTDKEWEANLASKKSGMNKKYHALSVLNQIIPYLADQLADMFPGNFCVTSGQDTYLFREEHGIPKDHYLDAYCIACSALTDAKKVSSPKGRPYMVRQFRRHDRQACHKANLNRRYYMGGKLVATNRHKAMDQKTDSLEEYRAAHSAADVSKLTVKHPSAQYKDMSRIMPGSILVSGEGKLFTLRRSEGRNKGQVNYFVSTEGIKYWARKCQYLRNNGGLQIYV

SEQ ID NO: 53 - protein, 872 aa, synthetic construct
MKRTADGSEFESPKKKRKVSGGSMMAVVYVISKSGKPLMPTTRCGHVRILLKEGKARVVERKPFTIQLTYESAEETQPLVLGIAPGRTNIGMSVVTESGESVFNAQIRTRNKDVPKLMKDRKQYRMAHRRLKRRCKRRRRAKAAGTAFEEGEKQRLLPGCFKPITCKSIRNKEARFNNRKRPVGWLTPTANHLLVTHLNVVKKVQKILPVAKVVLELNRFSFMAMNNPKVQRWQYQRGPLYGKGSVEEAVSMQQDGHCLFCKHGIDHYHHVVPRRKNGSETLENRVGLCEEHHRLVHTDKEWEANLASKKSGMNKKYHALSVLNQIIPYLADQLADMFPGNFCVTSGQDTYLFREEHGIPKDHYLDAYCIACSALTDAKKVSSPKGRPYMVRQFRRHDRQACHKANLNRRYYMGGKLVATNRHKAMDQKTDSLEEYRAAHSAADVSKLTVKHPSAQYKDMSRIMPGSILVSGEGKLFTLRRSEGRNKGQVNYFVSTEGIKYWARKCQYLRNNGGLQIYVSGGSKRTADGSEFEPKKKRKVLGGDSGGSGGSGGSVTPALQMKKPKQFCRRMGQKKQRPARAGQPHSSSDAAQAPAEQPHSSSDAAQAPCPRERCLGPPTTPGPYRSIYFSSPKGHLTRLGLEFFDQPAVPLARAFLGQVLVRRLPNGTELRGRIVETEAYLGPEDEAAHSRGGRQTPRNRGMFMKPGTLYVYIIYRMYFCMGISSQGRGANVLLRALEPLEGLETMRQLRATLRAATAARVLADRELCSGPSKLCQALAINKSFDQRDLAQDEAVWLERGPLEPSEPAVVAAARVGVGHAGEWARKPLRFYVRGSPWVSVVDRVAERDTQASGGSKRTADGSEFEPKKKRKV

SEQ ID NO: 54 - protein, 304 aa, synthetic construct
MGVFCLGPWGLGRKLRTPGKGPLQLLSRLCGDHLQAIPAKKAPAGQEEPGTPPSSPLSAEQLDRIQRNKAAALLRLAARNVPVGFGESWKKHLSGEFGKPYFIKLMGFVAEERKHYTVYPPPHQVFTWTQMCDIKDVKVVILGQDPYHGPNQAHGLCFSVQRPVPPPPSLENIYKELSTDIEDFVHPGHGDLSGWAKQGVLLLNAVLTVRAHQANSHKERGWEQFTDAVVSWLNQNSNGLVFLLWGSYAQKKGSAIDRKRHHVLQTAHPSPLSVYRGFFGCRHFSKTNELLQKSGKKPIDWKEL

SEQ ID NO: 55 - protein, 1749 aa, synthetic construct
MKRTADGSEFESPKKKRKVSGGSDKKYSIGLAIGTNSVGWAVITDEYKVPSKKFKVLGNTDRHSIKKNLIGALLFDSGETAEATRLKRTARRRYTRRKNRICYLQEIFSNEMAKVDDSFFHRLEESFLVEEDKKHERHPIFGNIVDEVAYHEKYPTIYHLRKKLVDSTDKADLRLIYLALAHMIKFRGHFLIEGDLNPDNSDVDKLFIQLVQTYNQLFEENPINASGVDAKAILSARLSKSRRLENLIAQLPGEKKNGLFGNLIALSLGLTPNFKSNFDLAEDAKLQLSKDTYDDDLDNLLAQIGDQYADLFLAAKNLSDAILLSDILRVNTEITKAPLSASMIKRYDEHHQDLTLLKALVRQQLPEKYKEIFFDQSKNGYAGYIDGGASQEEFYKFIKPILEKMDGTEELLVKLNREDLLRKQRTFDNGSIPHQIHLGELHAILRRQEDFYPFLKDNREKIEKILTFRIPYYVGPLARGNSRFAWMTRKSEETITPWNFEEVVDKGASAQSFIERMTNFDKNLPNEKVLPKHSLLYEYFTVYNELTKVKYVTEGMRKPAFLSGEQKKAIVDLLFKTNRKVTVKQLKEDYFKKIECFDSVEISGVEDRFNASLGTYHDLLKIIKDKDFLDNEENEDILEDIVLTLTLFEDREMIEERLKTYAHLFDDKVMKQLKRRRYTGWGRLSRKLINGIRDKQSGKTILDFLKSDGFANRNFMQLIHDDSLTFKEDIQKAQVSGQGDSLHEHIANLAGSPAIKKGILQTVKVVDELVKVMGRHKPENIVIEMARENQTTQKGQKNSRERMKRIEEGIKELGSQILKEHPVENTQLQNEKLYLYYLQNGRDMYVDQELDINRLSDYDVDHIVPQSFLKDDSIDNKVLTRSDKNRGKSDNVPSEEVVKKMKNYWRQLLNAKLITQRKFDNLTKAERGGLSELDKAGFIKRQLVETRQITKHVAQILDSRMNTKYDENDKLIREVKVITLKSKLVSDFRKDFQFYKVREINNYHHAHDAYLNAVVGTALIKKYPKLESEFVYGDYKVYDVRKMIAKSEQEIGKATAKYFFYSNIMNFFKTEITLANGEIRKRPLIETNGETGEIVWDKGRDFATVRKVLSMPQVNIVKKTEVQTGGFSKESILPKRNSDKLIARKKDWDPKKYGGFDSPTVAYSVLVVAKVEKGKSKKLKSVKELLGITIMERSSFEKNPIDFLEAKGYKEVKKDLIIKLPKYSLFELENGRKRMLASAGELQKGNELALPSKYVNFLYLASHYEKLKGSPEDNEQKQLFVEQHKHYLDEIIEQISEFSKRVILADANLDKVLSAYNKHRDKPIREQAENIIHLFTLTNLGAPAAFKYFDTTIDRKRYTSTKEVLDATLIHQSITGLYETRIDLSQLGGDSGGSKRTADGSEFEPKKKRKVLGGDSGGSGGSGGSGVFCLGPWGLGRKLRTPGKGPLQLLSRLCGDHLQAIPAKKAPAGQEEPGTPPSSPLSAEQLDRIQRNKAAALLRLAARNVPVGFGESWKKHLSGEFGKPYFIKLMGFVAEERKHYTVYPPPHQVFTWTQMCDIKDVKVVILGQDPYHGPNQAHGLCFSVQRPVPPPPSLENIYKELSTDIEDFVHPGHGDLSGWAKQGVLLLNAVLTVRAHQANSHKERGWEQFTDAVVSWLNQNSNGLVFLLWGSYAQKKGSAIDRKRHHVLQTAHPSPLSVYRGFFGCRHFSKTNELLQKSGKKPIDWKELSGGSKRTADGSEFEPKKKRKV

SEQ ID NO: 56 - protein, 303 aa, synthetic construct
GVFCLGPWGLGRKLRTPGKGPLQLLSRLCGDHLQAIPAKKAPAGQEEPGTPPSSPLSAEQLDRIQRNKAAALLRLAARNVPVGFGESWKKHLSGEFGKPYFIKLMGFVAEERKHYTVYPPPHQVFTWTQMCDIKDVKVVILGQDPAHGPNQAHGLCFSVQRPVPPPPSLENIYKELSTDIEDFVHPGHGDLSGWAKQGVLLLNAVLTVRAHQANSHKERGWEQFTDAVVSWLNQNSNGLVFLLWGSYAQKKGSAIDRKRHHVLQTAHPSPLSVYRGFFGCRHFSKTNELLQKSGKKPIDWKEL

SEQ ID NO: 57 - protein, 1749 aa, synthetic construct
MKRTADGSEFESPKKKRKVSGGSDKKYSIGLAIGTNSVGWAVITDEYKVPSKKFKVLGNTDRHSIKKNLIGALLFDSGETAEATRLKRTARRRYTRRKNRICYLQEIFSNEMAKVDDSFFHRLEESFLVEEDKKHERHPIFGNIVDEVAYHEKYPTIYHLRKKLVDSTDKADLRLIYLALAHMIKFRGHFLIEGDLNPDNSDVDKLFIQLVQTYNQLFEENPINASGVDAKAILSARLSKSRRLENLIAQLPGEKKNGLFGNLIALSLGLTPNFKSNFDLAEDAKLQLSKDTYDDDLDNLLAQIGDQYADLFLAAKNLSDAILLSDILRVNTEITKAPLSASMIKRYDEHHQDLTLLKALVRQQLPEKYKEIFFDQSKNGYAGYIDGGASQEEFYKFIKPILEKMDGTEELLVKLNREDLLRKQRTFDNGSIPHQIHLGELHAILRRQEDFYPFLKDNREKIEKILTFRIPYYVGPLARGNSRFAWMTRKSEETITPWNFEEVVDKGASAQSFIERMTNFDKNLPNEKVLPKHSLLYEYFTVYNELTKVKYVTEGMRKPAFLSGEQKKAIVDLLFKTNRKVTVKQLKEDYFKKIECFDSVEISGVEDRFNASLGTYHDLLKIIKDKDFLDNEENEDILEDIVLTLTLFEDREMIEERLKTYAHLFDDKVMKQLKRRRYTGWGRLSRKLINGIRDKQSGKTILDFLKSDGFANRNFMQLIHDDSLTFKEDIQKAQVSGQGDSLHEHIANLAGSPAIKKGILQTVKVVDELVKVMGRHKPENIVIEMARENQTTQKGQKNSRERMKRIEEGIKELGSQILKEHPVENTQLQNEKLYLYYLQNGRDMYVDQELDINRLSDYDVDHIVPQSFLKDDSIDNKVLTRSDKNRGKSDNVPSEEVVKKMKNYWRQLLNAKLITQRKFDNLTKAERGGLSELDKAGFIKRQLVETRQITKHVAQILDSRMNTKYDENDKLIREVKVITLKSKLVSDFRKDFQFYKVREINNYHHAHDAYLNAVVGTALIKKYPKLESEFVYGDYKVYDVRKMIAKSEQEIGKATAKYFFYSNIMNFFKTEITLANGEIRKRPLIETNGETGEIVWDKGRDFATVRKVLSMPQVNIVKKTEVQTGGFSKESILPKRNSDKLIARKKDWDPKKYGGFDSPTVAYSVLVVAKVEKGKSKKLKSVKELLGITIMERSSFEKNPIDFLEAKGYKEVKKDLIIKLPKYSLFELENGRKRMLASAGELQKGNELALPSKYVNFLYLASHYEKLKGSPEDNEQKQLFVEQHKHYLDEIIEQISEFSKRVILADANLDKVLSAYNKHRDKPIREQAENIIHLFTLTNLGAPAAFKYFDTTIDRKRYTSTKEVLDATLIHQSITGLYETRIDLSQLGGDSGGSKRTADGSEFEPKKKRKVLGGDSGGSGGSGGSGVFCLGPWGLGRKLRTPGKGPLQLLSRLCGDHLQAIPAKKAPAGQEEPGTPPSSPLSAEQLDRIQRNKAAALLRLAARNVPVGFGESWKKHLSGEFGKPYFIKLMGFVAEERKHYTVYPPPHQVFTWTQMCDIKDVKVVILGQDPAHGPNQAHGLCFSVQRPVPPPPSLENIYKELSTDIEDFVHPGHGDLSGWAKQGVLLLNAVLTVRAHQANSHKERGWEQFTDAVVSWLNQNSNGLVFLLWGSYAQKKGSAIDRKRHHVLQTAHPSPLSVYRGFFGCRHFSKTNELLQKSGKKPIDWKELSGGSKRTADGSEFEPKKKRKV

SEQ ID NO: 58 - protein, 303 aa, synthetic construct
GVFCLGPWGLGRKLRTPGKGPLQLLSRLCGDHLQAIPAKKAPAGQEEPGTPPSSPLSAEQLDRIQRNKAAALLRLAARNVPVGFGESWKKHLSGEFGKPYFIKLMGFVAEERKHYTVYPPPHQVFTWTQMCDIKDVKVVILGQDPYHGPNQAHGLCFSVQRPVPPPPSLENIYKELSTDIEDFVHPGHGDLSGWAKQGVLLLDAVLTVRAHQANSHKERGWEQFTDAVVSWLNQNSNGLVFLLWGSYAQKKGSAIDRKRHHVLQTAHPSPLSVYRGFFGCRHFSKTNELLQKSGKKPIDWKEL

SEQ ID NO: 59 - protein, 1749 aa, synthetic construct
MKRTADGSEFESPKKKRKVSGGSDKKYSIGLAIGTNSVGWAVITDEYKVPSKKFKVLGNTDRHSIKKNLIGALLFDSGETAEATRLKRTARRRYTRRKNRICYLQEIFSNEMAKVDDSFFHRLEESFLVEEDKKHERHPIFGNIVDEVAYHEKYPTIYHLRKKLVDSTDKADLRLIYLALAHMIKFRGHFLIEGDLNPDNSDVDKLFIQLVQTYNQLFEENPINASGVDAKAILSARLSKSRRLENLIAQLPGEKKNGLFGNLIALSLGLTPNFKSNFDLAEDAKLQLSKDTYDDDLDNLLAQIGDQYADLFLAAKNLSDAILLSDILRVNTEITKAPLSASMIKRYDEHHQDLTLLKALVRQQLPEKYKEIFFDQSKNGYAGYIDGGASQEEFYKFIKPILEKMDGTEELLVKLNREDLLRKQRTFDNGSIPHQIHLGELHAILRRQEDFYPFLKDNREKIEKILTFRIPYYVGPLARGNSRFAWMTRKSEETITPWNFEEVVDKGASAQSFIERMTNFDKNLPNEKVLPKHSLLYEYFTVYNELTKVKYVTEGMRKPAFLSGEQKKAIVDLLFKTNRKVTVKQLKEDYFKKIECFDSVEISGVEDRFNASLGTYHDLLKIIKDKDFLDNEENEDILEDIVLTLTLFEDREMIEERLKTYAHLFDDKVMKQLKRRRYTGWGRLSRKLINGIRDKQSGKTILDFLKSDGFANRNFMQLIHDDSLTFKEDIQKAQVSGQGDSLHEHIANLAGSPAIKKGILQTVKVVDELVKVMGRHKPENIVIEMARENQTTQKGQKNSRERMKRIEEGIKELGSQILKEHPVENTQLQNEKLYLYYLQNGRDMYVDQELDINRLSDYDVDHIVPQSFLKDDSIDNKVLTRSDKNRGKSDNVPSEEVVKKMKNYWRQLLNAKLITQRKFDNLTKAERGGLSELDKAGFIKRQLVETRQITKHVAQILDSRMNTKYDENDKLIREVKVITLKSKLVSDFRKDFQFYKVREINNYHHAHDAYLNAVVGTALIKKYPKLESEFVYGDYKVYDVRKMIAKSEQEIGKATAKYFFYSNIMNFFKTEITLANGEIRKRPLIETNGETGEIVWDKGRDFATVRKVLSMPQVNIVKKTEVQTGGFSKESILPKRNSDKLIARKKDWDPKKYGGFDSPTVAYSVLVVAKVEKGKSKKLKSVKELLGITIMERSSFEKNPIDFLEAKGYKEVKKDLIIKLPKYSLFELENGRKRMLASAGELQKGNELALPSKYVNFLYLASHYEKLKGSPEDNEQKQLFVEQHKHYLDEIIEQISEFSKRVILADANLDKVLSAYNKHRDKPIREQAENIIHLFTLTNLGAPAAFKYFDTTIDRKRYTSTKEVLDATLIHQSITGLYETRIDLSQLGGDSGGSKRTADGSEFEPKKKRKVLGGDSGGSGGSGGSGVFCLGPWGLGRKLRTPGKGPLQLLSRLCGDHLQAIPAKKAPAGQEEPGTPPSSPLSAEQLDRIQRNKAAALLRLAARNVPVGFGESWKKHLSGEFGKPYFIKLMGFVAEERKHYTVYPPPHQVFTWTQMCDIKDVKVVILGQDPYHGPNQAHGLCFSVQRPVPPPPSLENIYKELSTDIEDFVHPGHGDLSGWAKQGVLLLDAVLTVRAHQANSHKERGWEQFTDAVVSWLNQNSNGLVFLLWGSYAQKKGSAIDRKRHHVLQTAHPSPLSVYRGFFGCRHFSKTNELLQKSGKKPIDWKELSGGSKRTADGSEFEPKKKRKV

SEQ ID NO: 60 - protein, 245 aa, synthetic construct
EQLDRIQRNKAAALLRLAARNVPVGFGESWKKHLSGEFGKPYFIKLMGFVAEERKHYTVYPPPHQVFTWTQMCDIKDVKVVILGQDPAHGPNQAHGLCFSVQRPVPPPPSLENIYKELSTDIEDFVHPGHGDLSGWAKQGVLLLNAVLTVRAHQANSHKERGWEQFTDAVVSWLNQNSNGLVFLLWGSYAQKKGSAIDRKRHHVLQTAHPSPLSVYRGFFGCRHFSKTNELLQKSGKKPIDWKEL

SEQ ID NO: 61 - protein, 1691 aa, synthetic construct
MKRTADGSEFESPKKKRKVSGGSDKKYSIGLAIGTNSVGWAVITDEYKVPSKKFKVLGNTDRHSIKKNLIGALLFDSGETAEATRLKRTARRRYTRRKNRICYLQEIFSNEMAKVDDSFFHRLEESFLVEEDKKHERHPIFGNIVDEVAYHEKYPTIYHLRKKLVDSTDKADLRLIYLALAHMIKFRGHFLIEGDLNPDNSDVDKLFIQLVQTYNQLFEENPINASGVDAKAILSARLSKSRRLENLIAQLPGEKKNGLFGNLIALSLGLTPNFKSNFDLAEDAKLQLSKDTYDDDLDNLLAQIGDQYADLFLAAKNLSDAILLSDILRVNTEITKAPLSASMIKRYDEHHQDLTLLKALVRQQLPEKYKEIFFDQSKNGYAGYIDGGASQEEFYKFIKPILEKMDGTEELLVKLNREDLLRKQRTFDNGSIPHQIHLGELHAILRRQEDFYPFLKDNREKIEKILTFRIPYYVGPLARGNSRFAWMTRKSEETITPWNFEEVVDKGASAQSFIERMTNFDKNLPNEKVLPKHSLLYEYFTVYNELTKVKYVTEGMRKPAFLSGEQKKAIVDLLFKTNRKVTVKQLKEDYFKKIECFDSVEISGVEDRFNASLGTYHDLLKIIKDKDFLDNEENEDILEDIVLTLTLFEDREMIEERLKTYAHLFDDKVMKQLKRRRYTGWGRLSRKLINGIRDKQSGKTILDFLKSDGFANRNFMQLIHDDSLTFKEDIQKAQVSGQGDSLHEHIANLAGSPAIKKGILQTVKVVDELVKVMGRHKPENIVIEMARENQTTQKGQKNSRERMKRIEEGIKELGSQILKEHPVENTQLQNEKLYLYYLQNGRDMYVDQELDINRLSDYDVDHIVPQSFLKDDSIDNKVLTRSDKNRGKSDNVPSEEVVKKMKNYWRQLLNAKLITQRKFDNLTKAERGGLSELDKAGFIKRQLVETRQITKHVAQILDSRMNTKYDENDKLIREVKVITLKSKLVSDFRKDFQFYKVREINNYHHAHDAYLNAVVGTALIKKYPKLESEFVYGDYKVYDVRKMIAKSEQEIGKATAKYFFYSNIMNFFKTEITLANGEIRKRPLIETNGETGEIVWDKGRDFATVRKVLSMPQVNIVKKTEVQTGGFSKESILPKRNSDKLIARKKDWDPKKYGGFDSPTVAYSVLVVAKVEKGKSKKLKSVKELLGITIMERSSFEKNPIDFLEAKGYKEVKKDLIIKLPKYSLFELENGRKRMLASAGELQKGNELALPSKYVNFLYLASHYEKLKGSPEDNEQKQLFVEQHKHYLDEIIEQISEFSKRVILADANLDKVLSAYNKHRDKPIREQAENIIHLFTLTNLGAPAAFKYFDTTIDRKRYTSTKEVLDATLIHQSITGLYETRIDLSQLGGDSGGSKRTADGSEFEPKKKRKVLGGDSGGSGGSGGSEQLDRIQRNKAAALLRLAARNVPVGFGESWKKHLSGEFGKPYFIKLMGFVAEERKHYTVYPPPHQVFTWTQMCDIKDVKVVILGQDPAHGPNQAHGLCFSVQRPVPPPPSLENIYKELSTDIEDFVHPGHGDLSGWAKQGVLLLNAVLTVRAHQANSHKERGWEQFTDAVVSWLNQNSNGLVFLLWGSYAQKKGSAIDRKRHHVLQTAHPSPLSVYRGFFGCRHFSKTNELLQKSGKKPIDWKELSGGSKRTADGSEFEPKKKRKV

SEQ ID NO: 62 - protein, 245 aa, synthetic construct
EQLDRIQRNKAAALLRLAARNVPVGFGESWKKHLSGEFGKPYFIKLMGFVAEERKHYTVYPPPHQVFTWTQMCDIKDVKVVILGQDPYHGPNQAHGLCFSVQRPVPPPPSLENIYKELSTDIEDFVHPGHGDLSGWAKQGVLLLDAVLTVRAHQANSHKERGWEQFTDAVVSWLNQNSNGLVFLLWGSYAQKKGSAIDRKRHHVLQTAHPSPLSVYRGFFGCRHFSKTNELLQKSGKKPIDWKEL

SEQ ID NO: 63 - protein, 1691 aa, synthetic construct
MKRTADGSEFESPKKKRKVSGGSDKKYSIGLAIGTNSVGWAVITDEYKVPSKKFKVLGNTDRHSIKKNLIGALLFDSGETAEATRLKRTARRRYTRRKNRICYLQEIFSNEMAKVDDSFFHRLEESFLVEEDKKHERHPIFGNIVDEVAYHEKYPTIYHLRKKLVDSTDKADLRLIYLALAHMIKFRGHFLIEGDLNPDNSDVDKLFIQLVQTYNQLFEENPINASGVDAKAILSARLSKSRRLENLIAQLPGEKKNGLFGNLIALSLGLTPNFKSNFDLAEDAKLQLSKDTYDDDLDNLLAQIGDQYADLFLAAKNLSDAILLSDILRVNTEITKAPLSASMIKRYDEHHQDLTLLKALVRQQLPEKYKEIFFDQSKNGYAGYIDGGASQEEFYKFIKPILEKMDGTEELLVKLNREDLLRKQRTFDNGSIPHQIHLGELHAILRRQEDFYPFLKDNREKIEKILTFRIPYYVGPLARGNSRFAWMTRKSEETITPWNFEEVVDKGASAQSFIERMTNFDKNLPNEKVLPKHSLLYEYFTVYNELTKVKYVTEGMRKPAFLSGEQKKAIVDLLFKTNRKVTVKQLKEDYFKKIECFDSVEISGVEDRFNASLGTYHDLLKIIKDKDFLDNEENEDILEDIVLTLTLFEDREMIEERLKTYAHLFDDKVMKQLKRRRYTGWGRLSRKLINGIRDKQSGKTILDFLKSDGFANRNFMQLIHDDSLTFKEDIQKAQVSGQGDSLHEHIANLAGSPAIKKGILQTVKVVDELVKVMGRHKPENIVIEMARENQTTQKGQKNSRERMKRIEEGIKELGSQILKEHPVENTQLQNEKLYLYYLQNGRDMYVDQELDINRLSDYDVDHIVPQSFLKDDSIDNKVLTRSDKNRGKSDNVPSEEVVKKMKNYWRQLLNAKLITQRKFDNLTKAERGGLSELDKAGFIKRQLVETRQITKHVAQILDSRMNTKYDENDKLIREVKVITLKSKLVSDFRKDFQFYKVREINNYHHAHDAYLNAVVGTALIKKYPKLESEFVYGDYKVYDVRKMIAKSEQEIGKATAKYFFYSNIMNFFKTEITLANGEIRKRPLIETNGETGEIVWDKGRDFATVRKVLSMPQVNIVKKTEVQTGGFSKESILPKRNSDKLIARKKDWDPKKYGGFDSPTVAYSVLVVAKVEKGKSKKLKSVKELLGITIMERSSFEKNPIDFLEAKGYKEVKKDLIIKLPKYSLFELENGRKRMLASAGELQKGNELALPSKYVNFLYLASHYEKLKGSPEDNEQKQLFVEQHKHYLDEIIEQISEFSKRVILADANLDKVLSAYNKHRDKPIREQAENIIHLFTLTNLGAPAAFKYFDTTIDRKRYTSTKEVLDATLIHQSITGLYETRIDLSQLGGDSGGSKRTADGSEFEPKKKRKVLGGDSGGSGGSGGSEQLDRIQRNKAAALLRLAARNVPVGFGESWKKHLSGEFGKPYFIKLMGFVAEERKHYTVYPPPHQVFTWTQMCDIKDVKVVILGQDPYHGPNQAHGLCFSVQRPVPPPPSLENIYKELSTDIEDFVHPGHGDLSGWAKQGVLLLDAVLTVRAHQANSHKERGWEQFTDAVVSWLNQNSNGLVFLLWGSYAQKKGSAIDRKRHHVLQTAHPSPLSVYRGFFGCRHFSKTNELLQKSGKKPIDWKELSGGSKRTADGSEFEPKKKRKV

SEQ ID NO: 64 - protein, 409 aa, synthetic construct
EAENAGSYSLQQAQAFYTFPFQQLMAEAPNMAVVNEQQMPEEVPAPAPAQEPVQEAPKGRKRKPRTTEPKQPVEPKKPVESKKSGKSAKSKEKQEKITDTFKVKRKVDRFNGVSEAELLTKTLPDILTFNLDIVIIGINPGLMAAYKGHHYPGPGNHFWKCLFMSGLSEVQLNHMDDHTLPGKYGIGFTNMVERTTPGSKDLSSKEFREGGRILVQKLQKYQPRIAVFNGKCIYEIFSKEVFGVKVKNLEFGLQPHKIPDTETLCYVMPSSSARCAQFPRAQDKVHYYIKLKDLRDQLKGIERNMDVQEVQYTFDLQLAQEDAKKMAVKEEKYDPGYEAAYGGAYGENPCSSEPCGFSSNGLIESVELRGESAFSGIPNGQWMTQSFTDQIPSFSNHCGTQEQEEESHA

SEQ ID NO: 65 - protein, 269 aa, synthetic construct
PQAFLLGSIHEPAGALMEPQPCPGSLAESFLEEELRLNAELSQLQFSEPVGIIYNPVEYAWEPHRNYVTRYCQGPKEVLFLGMNPGPFGMAQTGVPFGEVSMVRDWLGIVGPVLTPPQEHPKRPVLGLECPQSEVSGARFWGFFRNLCGQPEVFFHHCFVHNLCPLLFLAPSGRNLTPAELPAKQREQLLGICDAALCRQVQLLGVRLVVGVGRLAEQRARRALAGLMPEVQVEGLLHPSPRNPQANKGWEAVAKERLNELGLLPLLLK

SEQ ID NO: 66 - protein, 344 aa, synthetic construct
PARALLPRRMGHRTLASTPALWASIPCPRSELRLDLVLPSGQSFRWREQSPAHWSGVLADQVWTLTQTEEQLHCTVYRGDKSQASRPTPDELEAVRKYFQLDVTLAQLYHHWGSVDSHFQEVAQKFQGVRLLRQDPIECLFSFICSSNNNIARITGMVERLCQAFGPRLIQLDDVTYHGFPSLQALAGPEVEAHLRKLGLGYRARYVSASARAILEEQGGLAWLQQLRESSYEEAHKALCILPGVGTKVADCICLMALDKPQAVPVDVHMWHIAQRDYSWHPTTSQAKGPSPQTNKELGNFFRSLWGPYAGWAQAVLFSADLRQSRHAQEPPAKRRKGSKGPEG

SEQ ID NO: 67 - protein, 579 aa, synthetic construct
GTTGLESLSLGDRGAAPTVTSSERLVPDPPNDLRKEDVAMELERVGEDEEQMMIKRSSECNPLLQEPIASAQFGATAGTECRKSVPCGWERVVKQRLFGKTAGRFDVYFISPQGLKFRSKSSLANYLHKNGETSLKPEDFDFTVLSKRGIKSRYKDCSMAALTSHLQNQSNNSNWNLRTRSKCKKDVFMPPSSSSELQESRGLSNFTSTHLLLKEDEGVDDVNFRKVRKPKGKVTILKGIPIKKTKKGCRKSCSGFVQSDSKRESVCNKADAESEPVAQKSQLDRTVCISDAGACGETLSVTSEENSLVKKKERSLSSGSNFCSEQKTSGIINKFCSAKDSEHNEKYEDTFLESEEIGTKVEVVERKEHLHTDILKRGSEMDNNCSPTRKDFTGEKIFQEDTIPRTQIERRKTSLYFSSKYNKEALSPPRRKAFKKWTPPRSPFNLVQETLFHDPWKLLIATIFLNRTSGKMAIPVLWKFLEKYPSAEVARTADWRDVSELLKPLGLYDLRAKTIVKFSDEYLTKQWKYPIELHGIGKYGNDSYRIFCVNEWKQVHPEDHKLNKYHDWLWENHEKLSLS

SEQ ID NO: 68 - protein, 545 aa, synthetic construct
TPLVSRLSRLWAIMRKPRAAVGSGHRKQAASQEGRQKHAKNNSQAKPSACDGMIAECPGAPAGLARQPEEVVLQASVSSYHLFRDVAEVTAFRGSLLSWYDQEKRDLPWRRRAEDEMDLDRRAYAVWVSEVMLQQTQVATVINYYTGWMQKWPTLQDLASASLEEVNQLWAGLGYYSRGRRLQEGARKVVEELGGHMPRTAETLQQLLPGVGRYTAGAIASIAFGQATGVVDGNVARVLCRVRAIGADPSSTLVSQQLWGLAQQLVDPARPGDFNQAAMELGATVCTPQRPLCSQCPVESLCRARQRVEQEQLLASGSLSGSPDVEECAPNTGQCHLCLPPSEPWDQTLGVVNFPRKASRKPPREESSATCVLEQPGALGAQILLVQRPNSGLLAGLWEFPSVTWEPSEQLQRKALLQELQRWAGPLPATHLRHLGEVVHTFSHIKLTYQVYGLALEGQTPVTTVPPGARWLTQEEFHTAAVSTAMKKVFRVYQGQQPGTCMGSKRSQVSSPCSRKKPRMGQQVLDNFFRSHISTDAHSLNSAAQ

SEQ ID NO: 69 - protein, 389 aa, synthetic construct
PEGPELHLASQFVNEACRALVFGGCVEKSSVSRNPEVPFESSAYRISASARGKELRLILSPLPGAQPQQEPLALVFRFGMSGSFQLVPREELPRHAHLRFYTAPPGPRLALCFVDIRRFGRWDLGGKWQPGRGPCVLQEYQQFRENVLRNLADKAFDRPICEALLDQRFFNGIGNYLRAEILYRLKIPPFEKARSVLEALQQHRPSPELTLSQKIRTKLQNPDLLELCHSVPKEVVQLGGKGYGSESGEEDFAAFRAWLRCYGMPGMSSLQDRHGRTIWFQGDPGPLAPKGRKSRKKKSKATQLSPEDRVEDALPPSKAPSRTRRAKRDLPKRTATQRPEGTSLQQDPEAPTVPKKGRRKGRQAASGHCRPRKVKADIPSLEPEGTSAS

SEQ ID NO: 70 - protein, 331 aa, synthetic construct
PEGPLVRKFHHLVSPFVGQQVVKTGGSSKKLQPASLQSLWLQDTQVHGKKLFLRFDLDEEMGPPGSSPTPEPPQKEVQKEGAADPKQVGEPSGQKTLDGSSRSAELVPQGEDDSEYLERDAPAGDAGRWLRVSFGLFGSVWVNDFSRAKKANKRGDWRDPSPRLVLHFGGGGFLAFYNCQLSWSSSPVVTPTCDILSEKFHRGQALEALGQAQPVCYTLLDQRYFSGLGNIIKNEALYRAGIHPLSLGSVLSASRREVLVDHVVEFSTAWLQGKFQGRPQHTQVYQKEQCPAGHQVMKEAFGPEDGLQRLTWWCPQCQPQLSEEPEQCQFS

SEQ ID NO: 71 - protein, 604 aa, synthetic construct
VEGPGCTLNGEKIRARVLPGQAVTGVRGSALRSLQGRALRLAASTVVVSPQAAALNNDSSQNVLSLFNGYVYSGVETLGKELFMYFGPKALRIHFGMKGFIMINPLEYKYKNGASPVLEVQLTKDLICFFDSSVELRNSMESQQRIRMMKELDVCSPEFSFLRAESEVKKQKGRMLGDVLMDQNVLPGVGNIIKNEALFDSGLHPAVKVCQLTDEQIHHLMKMIRDFSILFYRCRKAGLALSKHYKVYKRPNCGQCHCRITVCRFGDNNRMTYFCPHCQKENPQHVDICKLPTRNTIISWTSSRVDHVMDSVARKSEEHWTCVVCTLINKPSSKACDACLTSRPIDSVLKSEENSTVFSHLMKYPCNTFGKPHTEVKINRKTAFGTTTLVLTDFSNKSSTLERKTKQNQILDEEFQNSPPASVCLNDIQHPSKKTTNDITQPSSKVNISPTISSESKLFSPAHKKPKTAQYSSPELKSCNPGYSNSELQINMTDGPRTLNPDSPRCSKHNRLCILRVVGKDGENKGRQFYACPLPREAQCGFFEWADLSFPFCNHGKRSTMKTVLKIGPNNGKNFFVCPLGKEKQCNFFQWAENGPGIKIIPGC

SEQ ID NO: 72 - protein, 311 aa, synthetic construct
CSPQESGMTALSARMLTRSRSLGPGAGPRGCREEPGPLRRREAAAEARKSHSPVKRPRKAQRLRVAYEGSDSEKGEGAEPLKVPVWEPQDWQQQLVNIRAMRNKKDAPVDHLGTEHCYDSSAPPKVRRYQVLLSLMLSSQTKDQVTAGAMQRLRARGLTVDSILQTDDATLGKLIYPVGFWRSKVKYIKQTSAILQQHYGGDIPASVAELVALPGVGPKMAHLAMAVAWGTVSGIAVDTHVHRIANRLRWTKKATKSPEETRAALEEWLPRELWHEINGLLVGFGQQTCLPVHPRCHACLNQALCPAAQGL

SEQ ID NO: 73 - RNA, 23 nt, synthetic construct
  source 1..23: mol_type = other RNA
agaaatgtgtccccagttgacac

SEQ ID NO: 74 - RNA, 191 nt, synthetic construct
  source 1..191: mol_type = other RNA
ggctcgtccaactgcggttgaacgagcacaggctgagacattcgtaaggccgaaaggccggacgcaccctgggatttccccagtccccggaactgcatagcggatgccagttgatggagcaatctatcagataagccagggggaacaatcacctctctgtatcagagagagttttacaaaaggaggaacgg

SEQ ID NO: 75 - RNA, 20 nt, synthetic construct
  source 1..20: mol_type = other RNA
gtggggaaggggcccccaag

SEQ ID NO: 76 - RNA, 20 nt, synthetic construct
  source 1..20: mol_type = other RNA
ggtgagtgagtgtgtgcgtg

SEQ ID NO: 77 - RNA, 20 nt, synthetic construct
  source 1..20: mol_type = other RNA
ctaggagatacacctccacc

SEQ ID NO: 78 - RNA, 20 nt, synthetic construct
  source 1..20: mol_type = other RNA
gctgcagaagggattccatg

SEQ ID NO: 79 - RNA, 20 nt, synthetic construct
  source 1..20: mol_type = other RNA
agcgatccaggtgctgcaga

SEQ ID NO: 80 - RNA, 20 nt, synthetic construct
  source 1..20: mol_type = other RNA
ggattgacccaggccagggc

SEQ ID NO: 81 - RNA, 20 nt, synthetic construct
  source 1..20: mol_type = other RNA
gagtccgagcagaagaagaa

SEQ ID NO: 82 - RNA, 20 nt, synthetic construct
  source 1..20: mol_type = other RNA
gagccagaatgagcacgtga

SEQ ID NO: 83 - RNA, 20 nt, synthetic construct
  source 1..20: mol_type = other RNA
agaccagactgagcaagaga

SEQ ID NO: 84 - RNA, 20 nt, synthetic construct
  source 1..20: mol_type = other RNA
agctcagactgagcaagtga

SEQ ID NO: 85 - RNA, 20 nt, synthetic construct
  source 1..20: mol_type = other RNA
cacccagactgagcacgtgc

SEQ ID NO: 86 - RNA, 20 nt, synthetic construct
  source 1..20: mol_type = other RNA
tcagaaagtggtggctggtg

SEQ ID NO: 87 - RNA, 20 nt, synthetic construct
  source 1..20: mol_type = other RNA
aagtccgaggagaggaagaa

SEQ ID NO: 88 - RNA, 20 nt, synthetic construct
  source 1..20: mol_type = other RNA
ggacacgaagatcagctgca

SEQ ID NO: 89 - RNA, 20 nt, synthetic construct
  source 1..20: mol_type = other RNA
ccagcccgctggccctgtaa

SEQ ID NO: 90 - RNA, 20 nt, synthetic construct
  source 1..20: mol_type = other RNA
ggtggcggagatgcgacgcc

SEQ ID NO: 91 - RNA, 20 nt, synthetic construct
  source 1..20: mol_type = other RNA
gatggcggatactctccctt

SEQ ID NO: 92 - RNA, 20 nt, synthetic construct
  source 1..20: mol_type = other RNA
ggaaacggatagttctgaaa

SEQ ID NO: 93 - RNA, 20 nt, synthetic construct
  source 1..20: mol_type = other RNA
gaggtcgtggctgagcacaa

SEQ ID NO: 94 - RNA, 20 nt, synthetic construct
  source 1..20: mol_type = other RNA
gagccggagcagaagaagga

SEQ ID NO: 95 - RNA, 20 nt, synthetic construct
  source 1..20: mol_type = other RNA
gagtccgggaaggagaagaa

SEQ ID NO: 96 - RNA, 20 nt, synthetic construct
  source 1..20: mol_type = other RNA
gtcaggggaagagcacgtga

SEQ ID NO: 97 - RNA, 20 nt, synthetic construct
  source 1..20: mol_type = other RNA
ctgacctgcattctctcccc

SEQ ID NO: 98 - RNA, 20 nt, synthetic construct
  source 1..20: mol_type = other RNA
gagatggaagcagccaggga

SEQ ID NO: 99 - RNA, 20 nt, synthetic construct
  source 1..20: mol_type = other RNA
caaaagaatgctgcccacca

SEQ ID NO: 100 - RNA, 20 nt, synthetic construct
  source 1..20: mol_type = other RNA
ctgcctgaaagctggccgca

SEQ ID NO: 101 - RNA, 20 nt, synthetic construct
  source 1..20: mol_type = other RNA
tctgcctgaaagctggccgc

SEQ ID NO: 102 - RNA, 20 nt, synthetic construct
  source 1..20: mol_type = other RNA
atcttacaggaactccagga

SEQ ID NO: 103 - RNA, 20 nt, synthetic construct
  source 1..20: mol_type = other RNA
tcttacaggaactccaggat

SEQ ID NO: 104 - RNA, 20 nt, synthetic construct
  source 1..20: mol_type = other RNA
ggtgggatggggtccccaag

SEQ ID NO: 105 - RNA, 20 nt, synthetic construct
  source 1..20: mol_type = other RNA
ggtagggagaggcccccaga

SEQ ID NO: 106 - RNA, 20 nt, synthetic construct
  source 1..20: mol_type = other RNA
ggtggggagcggccccccag

SEQ ID NO: 107 - RNA, 21 nt, synthetic construct
  source 1..21: mol_type = other RNA
gagtgagtgagtgtgtgtgtg

SEQ ID NO: 108 - RNA, 21 nt, synthetic construct
  source 1..21: mol_type = other RNA
gtgtgagtaagtgtgtgtgtg

SEQ ID NO: 109 - RNA, 20 nt, synthetic construct
  source 1..20: mol_type = other RNA
ggtgagtgtgtgtgtgcatg

SEQ ID NO: 110 - RNA, 20 nt, synthetic construct
  source 1..20: mol_type = other RNA
gagttagagcagaagaagaa

SEQ ID NO: 111 - RNA, 20 nt, synthetic construct
  source 1..20: mol_type = other RNA
gagtctaagcagaagaagaa

SEQ ID NO: 112 - RNA, 20 nt, synthetic construct
  source 1..20: mol_type = other RNA
gaggccgagcagaagaaaga

SEQ ID NO: 113 - RNA, 22 nt, synthetic construct
  source 1..22: mol_type = other RNA
gtggtagacagcatgtgtccta

SEQ ID NO: 114 - RNA, 22 nt, synthetic construct
  source 1..22: mol_type = other RNA
atttacagcctggcctttgggg

SEQ ID NO: 115 - RNA, 22 nt, synthetic construct
  source 1..22: mol_type = other RNA
gtgtcaggtaatgtgctaaaca

SEQ ID NO: 116 - RNA, 22 nt, synthetic construct
  source 1..22: mol_type = other RNA
ggtggaggagggtgcatggggt

SEQ ID NO: 117 - RNA, 20 nt, synthetic construct
  source 1..20: mol_type = other RNA
tctgcttctccagccctggc

SEQ ID NO: 118 - protein, 713 aa, synthetic construct
MATGQDRVVALVDMDCFFVQVEQRQNPHLRNKPCAVVQYKSWKGGGIIAVSYEARAFGVTRSMWADDAKKLCPDLLLAQVRESRGKANLTKYREASVEVMEIMSRFAVIERASIDEAYVDLTSAVQERLQKLQGQPISADLLPSTYIEGLPQGPTTAEETVQKEGMRKQGLFQWLDSLQIDNLTSPDLQLTVGAVIVEEMRAAIERETGFQCSAGISHNKVLAKLACGLNKPNRQTLVSHGSVPQLFSQMPIRKIRSLGGKLGASVIEILGIEYMGELTQFTESQLQSHFGEKNGSWLYAMCRGIEHDPVKPRQLPKTIGCSKNFPGKTALATREQVQWWLLQLAQELEERLTKDRNDNDRVATQLVVSIRVQGDKRLSSLRRCCALTRYDAHKMSHDAFTVIKNCNTSGIQTEWSPPLTMLFLCATKFSASAPSSSTDITSFLSSDPSSLPKVPVTSSEAKTQGSGPAVTATKKATTSLESFFQKAAERQKVKEASLSSLTAPTQAPMSNSPSKPSLPFQTSQSTGTEPFFKQKSLLLKQKQLNNSSVSSPQQNPWSNCKALPNSLPTEYPGCVPVCEGVSKLEESSKATPAEMDLAHNSQSMHASSASKSVLEVTQKATPNPSLLAAEDQVPCEKCGSLVPVWDMPEHMDYHFALELQKSFLQPHSSNPQVVSAVSHQGKRNPKSPLACTNKRPRPEGMQTLESFFKPLTH

SEQ ID NO: 119 - RNA, 20 nt, synthetic construct
  source 1..20: mol_type = other RNA
ccaggatatacaccaccacc

SEQ ID NO: 120 - RNA, 20 nt, synthetic construct
  source 1..20: mol_type = other RNA
ctaggagataaaattccacc

SEQ ID NO: 121 - RNA, 20 nt, synthetic construct
  source 1..20: mol_type = other RNA
ctgagagatacacctccacg

SEQ ID NO: 122 - RNA, 20 nt, synthetic construct
  source 1..20: mol_type = other RNA
agggatccaggtgctgaaaa

SEQ ID NO: 123 - RNA, 20 nt, synthetic construct
  source 1..20: mol_type = other RNA
agctagccaggggctgcaga

SEQ ID NO: 124 - RNA, 20 nt, synthetic construct
  source 1..20: mol_type = other RNA
agcgatccaggtgcagctca

SEQ ID NO: 125 - RNA, 20 nt, synthetic construct
  source 1..20: mol_type = other RNA
aggtcagagtgagcaagtga

SEQ ID NO: 126 - RNA, 20 nt, synthetic construct
  source 1..20: mol_type = other RNA
agctcagaatgagcaagaga

SEQ ID NO: 127 - RNA, 20 nt, synthetic construct
  source 1..20: mol_type = other RNA
agcacagactgaggcagtga

SEQ ID NO: 128 - RNA, 20 nt, synthetic construct
  source 1..20: mol_type = other RNA
agctcaggcagagcaagaga

SEQ ID NO: 129 - RNA, 20 nt, synthetic construct
  source 1..20: mol_type = other RNA
agctcagagagagcaaggga

SEQ ID NO: 130 - RNA, 20 nt, synthetic construct
  source 1..20: mol_type = other RNA
cacccagacagagcacctgt

SEQ ID NO: 131 - RNA, 20 nt, synthetic construct
  source 1..20: mol_type = other RNA
caccaagacagaacacgtgc

SEQ ID NO: 132 - RNA, 20 nt, synthetic construct
  source 1..20: mol_type = other RNA
caccgagactgaccatgtgc

SEQ ID NO: 133 - protein, 313 aa, synthetic construct
MIGQKTLYSFFSPSPARKRHAPSPEPAVQGTGVAGVPEESGDAAAIPAKKAPAGQEEPGTPPSSPLSAEQLDRIQRNKAAALLRLAARNVPVGFGESWKKHLSGEFGKPYFIKLMGFVAEERKHYTVYPPPHQVFTWTQMCDIKDVKVVILGQDPYHGPNQAHGLCFSVQRPVPPPPSLENIYKELSTDIEDFVHPGHGDLSGWAKQGVLLLNAVLTVRAHQANSHKERGWEQFTDAVVSWLNQNSNGLVFLLWGSYAQKKGSAIDRKRHHVLQTAHPSPLSVYRGFFGCRHFSKTNELLQKSGKKPIDWKEL

SEQ ID NO: 134 - protein, 32 aa, synthetic construct
SGGSSGGSSGSETPGTSESATPESSGGSSGGS

SEQ ID NO: 135 - protein, 313 aa, synthetic construct
MIGQKTLYSFFSPSPARKRHAPSPEPAVQGTGVAGVPEESGDAAAIPAKKAPAGQEEPGTPPSSPLSAEQLDRIQRNKAAALLRLAARNVPVGFGESWKKHLSGEFGKPYFIKLMGFVAEERKHYTVYPPPHQVFTWTQMCDIKDVKVVILGQDPAHGPNQAHGLCFSVQRPVPPPPSLENIYKELSTDIEDFVHPGHGDLSGWAKQGVLLLNAVLTVRAHQANSHKERGWEQFTDAVVSWLNQNSNGLVFLLWGSYAQKKGSAIDRKRHHVLQTAHPSPLSVYRGFFGCRHFSKTNELLQKSGKKPIDWKEL

SEQ ID NO: 136 - protein, 1752 aa, synthetic construct
MKRTADGSEFESPKKKRKVDKKYSIGLAIGTNSVGWAVITDEYKVPSKKFKVLGNTDRHSIKKNLIGALLFDSGETAEATRLKRTARRRYTRRKNRICYLQEIFSNEMAKVDDSFFHRLEESFLVEEDKKHERHPIFGNIVDEVAYHEKYPTIYHLRKKLVDSTDKADLRLIYLALAHMIKFRGHFLIEGDLNPDNSDVDKLFIQLVQTYNQLFEENPINASGVDAKAILSARLSKSRRLENLIAQLPGEKKNGLFGNLIALSLGLTPNFKSNFDLAEDAKLQLSKDTYDDDLDNLLAQIGDQYADLFLAAKNLSDAILLSDILRVNTEITKAPLSASMIKRYDEHHQDLTLLKALVRQQLPEKYKEIFFDQSKNGYAGYIDGGASQEEFYKFIKPILEKMDGTEELLVKLNREDLLRKQRTFDNGSIPHQIHLGELHAILRRQEDFYPFLKDNREKIEKILTFRIPYYVGPLARGNSRFAWMTRKSEETITPWNFEEVVDKGASAQSFIERMTNFDKNLPNEKVLPKHSLLYEYFTVYNELTKVKYVTEGMRKPAFLSGEQKKAIVDLLFKTNRKVTVKQLKEDYFKKIECFDSVEISGVEDRFNASLGTYHDLLKIIKDKDFLDNEENEDILEDIVLTLTLFEDREMIEERLKTYAHLFDDKVMKQLKRRRYTGWGRLSRKLINGIRDKQSGKTILDFLKSDGFANRNFMQLIHDDSLTFKEDIQKAQVSGQGDSLHEHIANLAGSPAIKKGILQTVKVVDELVKVMGRHKPENIVIEMARENQTTQKGQKNSRERMKRIEEGIKELGSQILKEHPVENTQLQNEKLYLYYLQNGRDMYVDQELDINRLSDYDVDHIVPQSFLKDDSIDNKVLTRSDKNRGKSDNVPSEEVVKKMKNYWRQLLNAKLITQRKFDNLTKAERGGLSELDKAGFIKRQLVETRQITKHVAQILDSRMNTKYDENDKLIREVKVITLKSKLVSDFRKDFQFYKVREINNYHHAHDAYLNAVVGTALIKKYPKLESEFVYGDYKVYDVRKMIAKSEQEIGKATAKYFFYSNIMNFFKTEITLANGEIRKRPLIETNGETGEIVWDKGRDFATVRKVLSMPQVNIVKKTEVQTGGFSKESILPKRNSDKLIARKKDWDPKKYGGFDSPTVAYSVLVVAKVEKGKSKKLKSVKELLGITIMERSSFEKNPIDFLEAKGYKEVKKDLIIKLPKYSLFELENGRKRMLASAGELQKGNELALPSKYVNFLYLASHYEKLKGSPEDNEQKQLFVEQHKHYLDEIIEQISEFSKRVILADANLDKVLSAYNKHRDKPIREQAENIIHLFTLTNLGAPAAFKYFDTTIDRKRYTSTKEVLDATLIHQSITGLYETRIDLSQLGGDSGGSSGGSSGSETPGTSESATPESSGGSSGGSMIGQKTLYSFFSPSPARKRHAPSPEPAVQGTGVAGVPEESGDAAAIPAKKAPAGQEEPGTPPSSPLSAEQLDRIQRNKAAALLRLAARNVPVGFGESWKKHLSGEFGKPYFIKLMGFVAEERKHYTVYPPPHQVFTWTQMCDIKDVKVVILGQDPAHGPNQAHGLCFSVQRPVPPPPSLENIYKELSTDIEDFVHPGHGDLSGWAKQGVLLLNAVLTVRAHQANSHKERGWEQFTDAVVSWLNQNSNGLVFLLWGSYAQKKGSAIDRKRHHVLQTAHPSPLSVYRGFFGCRHFSKTNELLQKSGKKPIDWKELSGGSKRTADGSEFEPKKKRKV

SEQ ID NO: 137 - protein, 313 aa, synthetic construct
MIGQKTLYSFFSPSPARKRHAPSPEPAVQGTGVAGVPEESGDAAAIPAKKAPAGQEEPGTPPSSPLSAEQLDRIQRNKAAALLRLAARNVPVGFGESWKKHLSGEFGKPYFIKLMGFVAEERKHYTVYPPPHQVFTWTQMCDIKDVKVVILGQDPYHGPNQAHGLCFSVQRPVPPPPSLENIYKELSTDIEDFVHPGHGDLSGWAKQGVLLLDAVLTVRAHQANSHKERGWEQFTDAVVSWLNQNSNGLVFLLWGSYAQKKGSAIDRKRHHVLQTAHPSPLSVYRGFFGCRHFSKTNELLQKSGKKPIDWKEL

SEQ ID NO: 138 - protein, 1752 aa, synthetic construct
MKRTADGSEFESPKKKRKVDKKYSIGLAIGTNSVGWAVITDEYKVPSKKFKVLGNTDRHSIKKNLIGALLFDSGETAEATRLKRTARRRYTRRKNRICYLQEIFSNEMAKVDDSFFHRLEESFLVEEDKKHERHPIFGNIVDEVAYHEKYPTIYHLRKKLVDSTDKADLRLIYLALAHMIKFRGHFLIEGDLNPDNSDVDKLFIQLVQTYNQLFEENPINASGVDAKAILSARLSKSRRLENLIAQLPGEKKNGLFGNLIALSLGLTPNFKSNFDLAEDAKLQLSKDTYDDDLDNLLAQIGDQYADLFLAAKNLSDAILLSDILRVNTEITKAPLSASMIKRYDEHHQDLTLLKALVRQQLPEKYKEIFFDQSKNGYAGYIDGGASQEEFYKFIKPILEKMDGTEELLVKLNREDLLRKQRTFDNGSIPHQIHLGELHAILRRQEDFYPFLKDNREKIEKILTFRIPYYVGPLARGNSRFAWMTRKSEETITPWNFEEVVDKGASAQSFIERMTNFDKNLPNEKVLPKHSLLYEYFTVYNELTKVKYVTEGMRKPAFLSGEQKKAIVDLLFKTNRKVTVKQLKEDYFKKIECFDSVEISGVEDRFNASLGTYHDLLKIIKDKDFLDNEENEDILEDIVLTLTLFEDREMIEERLKTYAHLFDDKVMKQLKRRRYTGWGRLSRKLINGIRDKQSGKTILDFLKSDGFANRNFMQLIHDDSLTFKEDIQKAQVSGQGDSLHEHIANLAGSPAIKKGILQTVKVVDELVKVMGRHKPENIVIEMARENQTTQKGQKNSRERMKRIEEGIKELGSQILKEHPVENTQLQNEKLYLYYLQNGRDMYVDQELDINRLSDYDVDHIVPQSFLKDDSIDNKVLTRSDKNRGKSDNVPSEEVVKKMKNYWRQLLNAKLITQRKFDNLTKAERGGLSELDKAGFIKRQLVETRQITKHVAQILDSRMNTKYDENDKLIREVKVITLKSKLVSDFRKDFQFYKVREINNYHHAHDAYLNAVVGTALIKKYPKLESEFVYGDYKVYDVRKMIAKSEQEIGKATAKYFFYSNIMNFFKTEITLANGEIRKRPLIETNGETGEIVWDKGRDFATVRKVLSMPQVNIVKKTEVQTGGFSKESILPKRNSDKLIARKKDWDPKKYGGFDSPTVAYSVLVVAKVEKGKSKKLKSVKELLGITIMERSSFEKNPIDFLEAKGYKEVKKDLIIKLPKYSLFELENGRKRMLASAGELQKGNELALPSKYVNFLYLASHYEKLKGSPEDNEQKQLFVEQHKHYLDEIIEQISEFSKRVILADANLDKVLSAYNKHRDKPIREQAENIIHLFTLTNLGAPAAFKYFDTTIDRKRYTSTKEVLDATLIHQSITGLYETRIDLSQLGGDSGGSSGGSSGSETPGTSESATPESSGGSSGGSMIGQKTLYSFFSPSPARKRHAPSPEPAVQGTGVAGVPEESGDAAAIPAKKAPAGQEEPGTPPSSPLSAEQLDRIQRNKAAALLRLAARNVPVGFGESWKKHLSGEFGKPYFIKLMGFVAEERKHYTVYPPPHQVFTWTQMCDIKDVKVVILGQDPYHGPNQAHGLCFSVQRPVPPPPSLENIYKELSTDIEDFVHPGHGDLSGWAKQGVLLLDAVLTVRAHQANSHKERGWEQFTDAVVSWLNQNSNGLVFLLWGSYAQKKGSAIDRKRHHVLQTAHPSPLSVYRGFFGCRHFSKTNELLQKSGKKPIDWKELSGGSKRTADGSEFEPKKKRKV

SEQ ID NO: 139 - protein, 225 aa, synthetic construct
NVPVGFGESWKKHLSGEFGKPYFIKLMGFVAEERKHYTVYPPPHQVFTWTQMCDIKDVKVVILGQDPAHGPNQAHGLCFSVQRPVPPPPSLENIYKELSTDIEDFVHPGHGDLSGWAKQGVLLLNAVLTVRAHQANSHKERGWEQFTDAVVSWLNQNSNGLVFLLWGSYAQKKGSAIDRKRHHVLQTAHPSPLSVYRGFFGCRHFSKTNELLQKSGKKPIDWKEL

SEQ ID NO: 140 - protein, 1664 aa, synthetic construct
MKRTADGSEFESPKKKRKVDKKYSIGLAIGTNSVGWAVITDEYKVPSKKFKVLGNTDRHSIKKNLIGALLFDSGETAEATRLKRTARRRYTRRKNRICYLQEIFSNEMAKVDDSFFHRLEESFLVEEDKKHERHPIFGNIVDEVAYHEKYPTIYHLRKKLVDSTDKADLRLIYLALAHMIKFRGHFLIEGDLNPDNSDVDKLFIQLVQTYNQLFEENPINASGVDAKAILSARLSKSRRLENLIAQLPGEKKNGLFGNLIALSLGLTPNFKSNFDLAEDAKLQLSKDTYDDDLDNLLAQIGDQYADLFLAAKNLSDAILLSDILRVNTEITKAPLSASMIKRYDEHHQDLTLLKALVRQQLPEKYKEIFFDQSKNGYAGYIDGGASQEEFYKFIKPILEKMDGTEELLVKLNREDLLRKQRTFDNGSIPHQIHLGELHAILRRQEDFYPFLKDNREKIEKILTFRIPYYVGPLARGNSRFAWMTRKSEETITPWNFEEVVDKGASAQSFIERMTNFDKNLPNEKVLPKHSLLYEYFTVYNELTKVKYVTEGMRKPAFLSGEQKKAIVDLLFKTNRKVTVKQLKEDYFKKIECFDSVEISGVEDRFNASLGTYHDLLKIIKDKDFLDNEENEDILEDIVLTLTLFEDREMIEERLKTYAHLFDDKVMKQLKRRRYTGWGRLSRKLINGIRDKQSGKTILDFLKSDGFANRNFMQLIHDDSLTFKEDIQKAQVSGQGDSLHEHIANLAGSPAIKKGILQTVKVVDELVKVMGRHKPENIVIEMARENQTTQKGQKNSRERMKRIEEGIKELGSQILKEHPVENTQLQNEKLYLYYLQNGRDMYVDQELDINRLSDYDVDHIVPQSFLKDDSIDNKVLTRSDKNRGKSDNVPSEEVVKKMKNYWRQLLNAKLITQRKFDNLTKAERGGLSELDKAGFIKRQLVETRQITKHVAQILDSRMNTKYDENDKLIREVKVITLKSKLVSDFRKDFQFYKVREINNYHHAHDAYLNAVVGTALIKKYPKLESEFVYGDYKVYDVRKMIAKSEQEIGKATAKYFFYSNIMNFFKTEITLANGEIRKRPLIETNGETGEIVWDKGRDFATVRKVLSMPQVNIVKKTEVQTGGFSKESILPKRNSDKLIARKKDWDPKKYGGFDSPTVAYSVLVVAKVEKGKSKKLKSVKELLGITIMERSSFEKNPIDFLEAKGYKEVKKDLIIKLPKYSLFELENGRKRMLASAGELQKGNELALPSKYVNFLYLASHYEKLKGSPEDNEQKQLFVEQHKHYLDEIIEQISEFSKRVILADANLDKVLSAYNKHRDKPIREQAENIIHLFTLTNLGAPAAFKYFDTTIDRKRYTSTKEVLDATLIHQSITGLYETRIDLSQLGGDSGGSSGGSSGSETPGTSESATPESSGGSSGGSNVPVGFGESWKKHLSGEFGKPYFIKLMGFVAEERKHYTVYPPPHQVFTWTQMCDIKDVKVVILGQDPAHGPNQAHGLCFSVQRPVPPPPSLENIYKELSTDIEDFVHPGHGDLSGWAKQGVLLLNAVLTVRAHQANSHKERGWEQFTDAVVSWLNQNSNGLVFLLWGSYAQKKGSAIDRKRHHVLQTAHPSPLSVYRGFFGCRHFSKTNELLQKSGKKPIDWKELSGGSKRTADGSEFEPKKKRKV

SEQ ID NO: 141 - protein, 225 aa, synthetic construct
NVPVGFGESWKKHLSGEFGKPYFIKLMGFVAEERKHYTVYPPPHQVFTWTQMCDIKDVKVVILGQDPYHGPNQAHGLCFSVQRPVPPPPSLENIYKELSTDIEDFVHPGHGDLSGWAKQGVLLLDAVLTVRAHQANSHKERGWEQFTDAVVSWLNQNSNGLVFLLWGSYAQKKGSAIDRKRHHVLQTAHPSPLSVYRGFFGCRHFSKTNELLQKSGKKPIDWKEL

SEQ ID NO: 142 - protein, 1664 aa, synthetic construct
MKRTADGSEFESPKKKRKVDKKYSIGLAIGTNSVGWAVITDEYKVPSKKFKVLGNTDRHSIKKNLIGALLFDSGETAEATRLKRTARRRYTRRKNRICYLQEIFSNEMAKVDDSFFHRLEESFLVEEDKKHERHPIFGNIVDEVAYHEKYPTIYHLRKKLVDSTDKADLRLIYLALAHMIKFRGHFLIEGDLNPDNSDVDKLFIQLVQTYNQLFEENPINASGVDAKAILSARLSKSRRLENLIAQLPGEKKNGLFGNLIALSLGLTPNFKSNFDLAEDAKLQLSKDTYDDDLDNLLAQIGDQYADLFLAAKNLSDAILLSDILRVNTEITKAPLSASMIKRYDEHHQDLTLLKALVRQQLPEKYKEIFFDQSKNGYAGYIDGGASQEEFYKFIKPILEKMDGTEELLVKLNREDLLRKQRTFDNGSIPHQIHLGELHAILRRQEDFYPFLKDNREKIEKILTFRIPYYVGPLARGNSRFAWMTRKSEETITPWNFEEVVDKGASAQSFIERMTNFDKNLPNEKVLPKHSLLYEYFTVYNELTKVKYVTEGMRKPAFLSGEQKKAIVDLLFKTNRKVTVKQLKEDYFKKIECFDSVEISGVEDRFNASLGTYHDLLKIIKDKDFLDNEENEDILEDIVLTLTLFEDREMIEERLKTYAHLFDDKVMKQLKRRRYTGWGRLSRKLINGIRDKQSGKTILDFLKSDGFANRNFMQLIHDDSLTFKEDIQKAQVSGQGDSLHEHIANLAGSPAIKKGILQTVKVVDELVKVMGRHKPENIVIEMARENQTTQKGQKNSRERMKRIEEGIKELGSQILKEHPVENTQLQNEKLYLYYLQNGRDMYVDQELDINRLSDYDVDHIVPQSFLKDDSIDNKVLTRSDKNRGKSDNVPSEEVVKKMKNYWRQLLNAKLITQRKFDNLTKAERGGLSELDKAGFIKRQLVETRQITKHVAQILDSRMNTKYDENDKLIREVKVITLKSKLVSDFRKDFQFYKVREINNYHHAHDAYLNAVVGTALIKKYPKLESEFVYGDYKVYDVRKMIAKSEQEIGKATAKYFFYSNIMNFFKTEITLANGEIRKRPLIETNGETGEIVWDKGRDFATVRKVLSMPQVNIVKKTEVQTGGFSKESILPKRNSDKLIARKKDWDPKKYGGFDSPTVAYSVLVVAKVEKGKSKKLKSVKELLGITIMERSSFEKNPIDFLEAKGYKEVKKDLIIKLPKYSLFELENGRKRMLASAGELQKGNELALPSKYVNFLYLASHYEKLKGSPEDNEQKQLFVEQHKHYLDEIIEQISEFSKRVILADANLDKVLSAYNKHRDKPIREQAENIIHLFTLTNLGAPAAFKYFDTTIDRKRYTSTKEVLDATLIHQSITGLYETRIDLSQLGGDSGGSSGGSSGSETPGTSESATPESSGGSSGGSNVPVGFGESWKKHLSGEFGKPYFIKLMGFVAEERKHYTVYPPPHQVFTWTQMCDIKDVKVVILGQDPYHGPNQAHGLCFSVQRPVPPPPSLENIYKELSTDIEDFVHPGHGDLSGWAKQGVLLLDAVLTVRAHQANSHKERGWEQFTDAVVSWLNQNSNGLVFLLWGSYAQKKGSAIDRKRHHVLQTAHPSPLSVYRGFFGCRHFSKTNELLQKSGKKPIDWKELSGGSKRTADGSEFEPKKKRKV

SEQ ID NO: 143 - protein, 1664 aa, synthetic construct
MKRTADGSEFESPKKKRKVNVPVGFGESWKKHLSGEFGKPYFIKLMGFVAEERKHYTVYPPPHQVFTWTQMCDIKDVKVVILGQDPAHGPNQAHGLCFSVQRPVPPPPSLENIYKELSTDIEDFVHPGHGDLSGWAKQGVLLLNAVLTVRAHQANSHKERGWEQFTDAVVSWLNQNSNGLVFLLWGSYAQKKGSAIDRKRHHVLQTAHPSPLSVYRGFFGCRHFSKTNELLQKSGKKPIDWKELSGGSSGGSSGSETPGTSESATPESSGGSSGGSDKKYSIGLAIGTNSVGWAVITDEYKVPSKKFKVLGNTDRHSIKKNLIGALLFDSGETAEATRLKRTARRRYTRRKNRICYLQEIFSNEMAKVDDSFFHRLEESFLVEEDKKHERHPIFGNIVDEVAYHEKYPTIYHLRKKLVDSTDKADLRLIYLALAHMIKFRGHFLIEGDLNPDNSDVDKLFIQLVQTYNQLFEENPINASGVDAKAILSARLSKSRRLENLIAQLPGEKKNGLFGNLIALSLGLTPNFKSNFDLAEDAKLQLSKDTYDDDLDNLLAQIGDQYADLFLAAKNLSDAILLSDILRVNTEITKAPLSASMIKRYDEHHQDLTLLKALVRQQLPEKYKEIFFDQSKNGYAGYIDGGASQEEFYKFIKPILEKMDGTEELLVKLNREDLLRKQRTFDNGSIPHQIHLGELHAILRRQEDFYPFLKDNREKIEKILTFRIPYYVGPLARGNSRFAWMTRKSEETITPWNFEEVVDKGASAQSFIERMTNFDKNLPNEKVLPKHSLLYEYFTVYNELTKVKYVTEGMRKPAFLSGEQKKAIVDLLFKTNRKVTVKQLKEDYFKKIECFDSVEISGVEDRFNASLGTYHDLLKIIKDKDFLDNEENEDILEDIVLTLTLFEDREMIEERLKTYAHLFDDKVMKQLKRRRYTGWGRLSRKLINGIRDKQSGKTILDFLKSDGFANRNFMQLIHDDSLTFKEDIQKAQVSGQGDSLHEHIANLAGSPAIKKGILQTVKVVDELVKVMGRHKPENIVIEMARENQTTQKGQKNSRERMKRIEEGIKELGSQILKEHPVENTQLQNEKLYLYYLQNGRDMYVDQELDINRLSDYDVDHIVPQSFLKDDSIDNKVLTRSDKNRGKSDNVPSEEVVKKMKNYWRQLLNAKLITQRKFDNLTKAERGGLSELDKAGFIKRQLVETRQITKHVAQILDSRMNTKYDENDKLIREVKVITLKSKLVSDFRKDFQFYKVREINNYHHAHDAYLNAVVGTALIKKYPKLESEFVYGDYKVYDVRKMIAKSEQEIGKATAKYFFYSNIMNFFKTEITLANGEIRKRPLIETNGETGEIVWDKGRDFATVRKVLSMPQVNIVKKTEVQTGGFSKESILPKRNSDKLIARKKDWDPKKYGGFDSPTVAYSVLVVAKVEKGKSKKLKSVKELLGITIMERSSFEKNPIDFLEAKGYKEVKKDLIIKLPKYSLFELENGRKRMLASAGELQKGNELALPSKYVNFLYLASHYEKLKGSPEDNEQKQLFVEQHKHYLDEIIEQISEFSKRVILADANLDKVLSAYNKHRDKPIREQAENIIHLFTLTNLGAPAAFKYFDTTIDRKRYTSTKEVLDATLIHQSITGLYETRIDLSQLGGDSGGSKRTADGSEFEPKKKRKV

SEQ ID NO: 144 - protein, 225 aa, synthetic construct
NVPVGFGESWKKHLSGEFGKPYFIKLMGFVAEERKHYTVYPPPHQVFTWTQMCDIKDVKVVILGQDPAHGPNQAHGLCFSVQRPVPPPPSLENIYKELSTDIEDFVHPGHGDLSGWAKQGVLLLNVVLTVRAHQANSHKERGWEQFTDAVVSWLNQNSNGLVFLLWGSYAQKKGSAIDRKRHHVLQTAHPSPLSVYRGFFGCRHFSKTNELLQKSGKKPIDWKEL

SEQ ID NO: 145 - protein, 1664 aa, synthetic construct
MKRTADGSEFESPKKKRKVNVPVGFGESWKKHLSGEFGKPYFIKLMGFVAEERKHYTVYPPPHQVFTWTQMCDIKDVKVVILGQDPAHGPNQAHGLCFSVQRPVPPPPSLENIYKELSTDIEDFVHPGHGDLSGWAKQGVLLLNVVLTVRAHQANSHKERGWEQFTDAVVSWLNQNSNGLVFLLWGSYAQKKGSAIDRKRHHVLQTAHPSPLSVYRGFFGCRHFSKTNELLQKSGKKPIDWKELSGGSSGGSSGSETPGTSESATPESSGGSSGGSDKKYSIGLAIGTNSVGWAVITDEYKVPSKKFKVLGNTDRHSIKKNLIGALLFDSGETAEATRLKRTARRRYTRRKNRICYLQEIFSNEMAKVDDSFFHRLEESFLVEEDKKHERHPIFGNIVDEVAYHEKYPTIYHLRKKLVDSTDKADLRLIYLALAHMIKFRGHFLIEGDLNPDNSDVDKLFIQLVQTYNQLFEENPINASGVDAKAILSARLSKSRRLENLIAQLPGEKKNGLFGNLIALSLGLTPNFKSNFDLAEDAKLQLSKDTYDDDLDNLLAQIGDQYADLFLAAKNLSDAILLSDILRVNTEITKAPLSASMIKRYDEHHQDLTLLKALVRQQLPEKYKEIFFDQSKNGYAGYIDGGASQEEFYKFIKPILEKMDGTEELLVKLNREDLLRKQRTFDNGSIPHQIHLGELHAILRRQEDFYPFLKDNREKIEKILTFRIPYYVGPLARGNSRFAWMTRKSEETITPWNFEEVVDKGASAQSFIERMTNFDKNLPNEKVLPKHSLLYEYFTVYNELTKVKYVTEGMRKPAFLSGEQKKAIVDLLFKTNRKVTVKQLKEDYFKKIECFDSVEISGVEDRFNASLGTYHDLLKIIKDKDFLDNEENEDILEDIVLTLTLFEDREMIEERLKTYAHLFDDKVMKQLKRRRYTGWGRLSRKLINGIRDKQSGKTILDFLKSDGFANRNFMQLIHDDSLTFKEDIQKAQVSGQGDSLHEHIANLAGSPAIKKGILQTVKVVDELVKVMGRHKPENIVIEMARENQTTQKGQKNSRERMKRIEEGIKELGSQILKEHPVENTQLQNEKLYLYYLQNGRDMYVDQELDINRLSDYDVDHIVPQSFLKDDSIDNKVLTRSDKNRGKSDNVPSEEVVKKMKNYWRQLLNAKLITQRKFDNLTKAERGGLSELDKAGFIKRQLVETRQITKHVAQILDSRMNTKYDENDKLIREVKVITLKSKLVSDFRKDFQFYKVREINNYHHAHDAYLNAVVGTALIKKYPKLESEFVYGDYKVYDVRKMIAKSEQEIGKATAKYFFYSNIMNFFKTEITLANGEIRKRPLIETNGETGEIVWDKGRDFATVRKVLSMPQVNIVKKTEVQTGGFSKESILPKRNSDKLIARKKDWDPKKYGGFDSPTVAYSVLVVAKVEKGKSKKLKSVKELLGITIMERSSFEKNPIDFLEAKGYKEVKKDLIIKLPKYSLFELENGRKRMLASAGELQKGNELALPSKYVNFLYLASHYEKLKGSPEDNEQKQLFVEQHKHYLDEIIEQISEFSKRVILADANLDKVLSAYNKHRDKPIREQAENIIHLFTLTNLGAPAAFKYFDTTIDRKRYTSTKEVLDATLIHQSITGLYETRIDLSQLGGDSGGSKRTADGSEFEPKKKRKV

SEQ ID NO: 146 - protein, 225 aa, synthetic construct
NVPVGFGESWKKHLSGEFGKPYFIKLMGFVAEERKHYTVYPPPHQVFTWTQMCDIKDVKVVILGQDPAHGPNQAHGLCFSVQRPVPPPPSLENIYKELSTDIEDFVHPGHGDLSGWAKQGVLLLNTVLTVRAHQANSHKERGWEQFTDAVVSWLNQNSNGLVFLLWGSYAQKKGSAIDRKRHHVLQTAHPSPLSVYRGFFGCRHFSKTNELLQKSGKKPIDWKEL

SEQ ID NO: 147 - protein, 1664 aa, synthetic construct
MKRTADGSEFESPKKKRKVNVPVGFGESWKKHLSGEFGKPYFIKLMGFVAEERKHYTVYPPPHQVFTWTQMCDIKDVKVVILGQDPAHGPNQAHGLCFSVQRPVPPPPSLENIYKELSTDIEDFVHPGHGDLSGWAKQGVLLLNTVLTVRAHQANSHKERGWEQFTDAVVSWLNQNSNGLVFLLWGSYAQKKGSAIDRKRHHVLQTAHPSPLSVYRGFFGCRHFSKTNELLQKSGKKPIDWKELSGGSSGGSSGSETPGTSESATPESSGGSSGGSDKKYSIGLAIGTNSVGWAVITDEYKVPSKKFKVLGNTDRHSIKKNLIGALLFDSGETAEATRLKRTARRRYTRRKNRICYLQEIFSNEMAKVDDSFFHRLEESFLVEEDKKHERHPIFGNIVDEVAYHEKYPTIYHLRKKLVDSTDKADLRLIYLALAHMIKFRGHFLIEGDLNPDNSDVDKLFIQLVQTYNQLFEENPINASGVDAKAILSARLSKSRRLENLIAQLPGEKKNGLFGNLIALSLGLTPNFKSNFDLAEDAKLQLSKDTYDDDLDNLLAQIGDQYADLFLAAKNLSDAILLSDILRVNTEITKAPLSASMIKRYDEHHQDLTLLKALVRQQLPEKYKEIFFDQSKNGYAGYIDGGASQEEFYKFIKPILEKMDGTEELLVKLNREDLLRKQRTFDNGSIPHQIHLGELHAILRRQEDFYPFLKDNREKIEKILTFRIPYYVGPLARGNSRFAWMTRKSEETITPWNFEEVVDKGASAQSFIERMTNFDKNLPNEKVLPKHSLLYEYFTVYNELTKVKYVTEGMRKPAFLSGEQKKAIVDLLFKTNRKVTVKQLKEDYFKKIECFDSVEISGVEDRFNASLGTYHDLLKIIKDKDFLDNEENEDILEDIVLTLTLFEDREMIEERLKTYAHLFDDKVMKQLKRRRYTGWGRLSRKLINGIRDKQSGKTILDFLKSDGFANRNFMQLIHDDSLTFKEDIQKAQVSGQGDSLHEHIANLAGSPAIKKGILQTVKVVDELVKVMGRHKPENIVIEMARENQTTQKGQKNSRERMKRIEEGIKELGSQILKEHPVENTQLQNEKLYLYYLQNGRDMYVDQELDINRLSDYDVDHIVPQSFLKDDSIDNKVLTRSDKNRGKSDNVPSEEVVKKMKNYWRQLLNAKLITQRKFDNLTKAERGGLSELDKAGFIKRQLVETRQITKHVAQILDSRMNTKYDENDKLIREVKVITLKSKLVSDFRKDFQFYKVREINNYHHAHDAYLNAVVGTALIKKYPKLESEFVYGDYKVYDVRKMIAKSEQEIGKATAKYFFYSNIMNFFKTEITLANGEIRKRPLIETNGETGEIVWDKGRDFATVRKVLSMPQVNIVKKTEVQTGGFSKESILPKRNSDKLIARKKDWDPKKYGGFDSPTVAYSVLVVAKVEKGKSKKLKSVKELLGITIMERSSFEKNPIDFLEAKGYKEVKKDLIIKLPKYSLFELENGRKRMLASAGELQKGNELALPSKYVNFLYLASHYEKLKGSPEDNEQKQLFVEQHKHYLDEIIEQISEFSKRVILADANLDKVLSAYNKHRDKPIREQAENIIHLFTLTNLGAPAAFKYFDTTIDRKRYTSTKEVLDATLIHQSITGLYETRIDLSQLGGDSGGSKRTADGSEFEPKKKRKV

SEQ ID NO: 148 - protein, 225 aa, synthetic construct
NVPVGFGESWKKHLSGEFGKPYFIKLMGFVAEERKHYTVYPPPHQVFTWTQMCDIKDVKVVILGQDPAHGPNQAHGLCFSVQRPVPPPPSLENIYKELSTDIEDFVHPGHGDLSGWAKQGVLLLNAVLTVRAHQANSHKERGWEQFTDAVVSWLNQNSNGLVFLLWGSYAAKKGSAIDRKRHHVLQTAHPSPLSVYRGFFGCRHFSKTNELLQKSGKKPIDWKEL

SEQ ID NO: 149 - protein, 1664 aa, synthetic construct
MKRTADGSEFESPKKKRKVNVPVGFGESWKKHLSGEFGKPYFIKLMGFVAEERKHYTVYPPPHQVFTWTQMCDIKDVKVVILGQDPAHGPNQAHGLCFSVQRPVPPPPSLENIYKELSTDIEDFVHPGHGDLSGWAKQGVLLLNAVLTVRAHQANSHKERGWEQFTDAVVSWLNQNSNGLVFLLWGSYAAKKGSAIDRKRHHVLQTAHPSPLSVYRGFFGCRHFSKTNELLQKSGKKPIDWKELSGGSSGGSSGSETPGTSESATPESSGGSSGGSDKKYSIGLAIGTNSVGWAVITDEYKVPSKKFKVLGNTDRHSIKKNLIGALLFDSGETAEATRLKRTARRRYTRRKNRICYLQEIFSNEMAKVDDSFFHRLEESFLVEEDKKHERHPIFGNIVDEVAYHEKYPTIYHLRKKLVDSTDKADLRLIYLALAHMIKFRGHFLIEGDLNPDNSDVDKLFIQLVQTYNQLFEENPINASGVDAKAILSARLSKSRRLENLIAQLPGEKKNGLFGNLIALSLGLTPNFKSNFDLAEDAKLQLSKDTYDDDLDNLLAQIGDQYADLFLAAKNLSDAILLSDILRVNTEITKAPLSASMIKRYDEHHQDLTLLKALVRQQLPEKYKEIFFDQSKNGYAGYIDGGASQEEFYKFIKPILEKMDGTEELLVKLNREDLLRKQRTFDNGSIPHQIHLGELHAILRRQEDFYPFLKDNREKIEKILTFRIPYYVGPLARGNSRFAWMTRKSEETITPWNFEEVVDKGASAQSFIERMTNFDKNLPNEKVLPKHSLLYEYFTVYNELTKVKYVTEGMRKPAFLSGEQKKAIVDLLFKTNRKVTVKQLKEDYFKKIECFDSVEISGVEDRFNASLGTYHDLLKIIKDKDFLDNEENEDILEDIVLTLTLFEDREMIEERLKTYAHLFDDKVMKQLKRRRYTGWGRLSRKLINGIRDKQSGKTILDFLKSDGFANRNFMQLIHDDSLTFKEDIQKAQVSGQGDSLHEHIANLAGSPAIKKGILQTVKVVDELVKVMGRHKPENIVIEMARENQTTQKGQKNSRERMKRIEEGIKELGSQILKEHPVENTQLQNEKLYLYYLQNGRDMYVDQELDINRLSDYDVDHIVPQSFLKDDSIDNKVLTRSDKNRGKSDNVPSEEVVKKMKNYWRQLLNAKLITQRKFDNLTKAERGGLSELDKAGFIKRQLVETRQITKHVAQILDSRMNTKYDENDKLIREVKVITLKSKLVSDFRKDFQFYKVREINNYHHAHDAYLNAVVGTALIKKYPKLESEFVYGDYKVYDVRKMIAKSEQEIGKATAKYFFYSNIMNFFKTEITLANGEIRKRPLIETNGETGEIVWDKGRDFATVRKVLSMPQVNIVKKTEVQTGGFSKESILPKRNSDKLIARKKDWDPKKYGGFDSPTVAYSVLVVAKVEKGKSKKLKSVKELLGITIMERSSFEKNPIDFLEAKGYKEVKKDLIIKLPKYSLFELENGRKRMLASAGELQKGNELALPSKYVNFLYLASHYEKLKGSPEDNEQKQLFVEQHKHYLDEIIEQISEFSKRVILADANLDKVLSAYNKHRDKPIREQAENIIHLFTLTNLGAPAAFKYFDTTIDRKRYTSTKEVLDATLIHQSITGLYETRIDLSQLGGDSGGSKRTADGSEFEPKKKRKV

SEQ ID NO: 150 - protein, 225 aa, synthetic construct
NVPVGFGESWKKHLSGEFGKPYFIKLMGFVAEERKHYTVYPPPHQVFTWTQMCDIKDVKVVILGQDPAHGPNQAHGLCFSVQRPVPPPPSLENIYKELSTDIEDFVHPGHGDLSGWAKQGVLLLNTVLTVRAHQANSHKERGWEQFTDAVVSWLNQNSNGLVFLLWGSYAAKKGSAIDRKRHHVLQTAHPSPLSVYRGFFGCRHFSKTNELLQKSGKKPIDWKEL

SEQ ID NO: 151 - protein, 1664 aa, synthetic construct
MKRTADGSEFESPKKKRKVNVPVGFGESWKKHLSGEFGKPYFIKLMGFVAEERKHYTVYPPPHQVFTWTQMCDIKDVKVVILGQDPAHGPNQAHGLCFSVQRPVPPPPSLENIYKELSTDIEDFVHPGHGDLSGWAKQGVLLLNTVLTVRAHQANSHKERGWEQFTDAVVSWLNQNSNGLVFLLWGSYAAKKGSAIDRKRHHVLQTAHPSPLSVYRGFFGCRHFSKTNELLQKSGKKPIDWKELSGGSSGGSSGSETPGTSESATPESSGGSSGGSDKKYSIGLAIGTNSVGWAVITDEYKVPSKKFKVLGNTDRHSIKKNLIGALLFDSGETAEATRLKRTARRRYTRRKNRICYLQEIFSNEMAKVDDSFFHRLEESFLVEEDKKHERHPIFGNIVDEVAYHEKYPTIYHLRKKLVDSTDKADLRLIYLALAHMIKFRGHFLIEGDLNPDNSDVDKLFIQLVQTYNQLFEENPINASGVDAKAILSARLSKSRRLENLIAQLPGEKKNGLFGNLIALSLGLTPNFKSNFDLAEDAKLQLSKDTYDDDLDNLLAQIGDQYADLFLAAKNLSDAILLSDILRVNTEITKAPLSASMIKRYDEHHQDLTLLKALVRQQLPEKYKEIFFDQSKNGYAGYIDGGASQEEFYKFIKPILEKMDGTEELLVKLNREDLLRKQRTFDNGSIPHQIHLGELHAILRRQEDFYPFLKDNREKIEKILTFRIPYYVGPLARGNSRFAWMTRKSEETITPWNFEEVVDKGASAQSFIERMTNFDKNLPNEKVLPKHSLLYEYFTVYNELTKVKYVTEGMRKPAFLSGEQKKAIVDLLFKTNRKVTVKQLKEDYFKKIECFDSVEISGVEDRFNASLGTYHDLLKIIKDKDFLDNEENEDILEDIVLTLTLFEDREMIEERLKTYAHLFDDKVMKQLKRRRYTGWGRLSRKLINGIRDKQSGKTILDFLKSDGFANRNFMQLIHDDSLTFKEDIQKAQVSGQGDSLHEHIANLAGSPAIKKGILQTVKVVDELVKVMGRHKPENIVIEMARENQTTQKGQKNSRERMKRIEEGIKELGSQILKEHPVENTQLQNEKLYLYYLQNGRDMYVDQELDINRLSDYDVDHIVPQSFLKDDSIDNKVLTRSDKNRGKSDNVPSEEVVKKMKNYWRQLLNAKLITQRKFDNLTKAERGGLSELDKAGFIKRQLVETRQITKHVAQILDSRMNTKYDENDKLIREVKVITLKSKLVSDFRKDFQFYKVREINNYHHAHDAYLNAVVGTALIKKYPKLESEFVYGDYKVYDVRKMIAKSEQEIGKATAKYFFYSNIMNFFKTEITLANGEIRKRPLIETNGETGEIVWDKGRDFATVRKVLSMPQVNIVKKTEVQTGGFSKESILPKRNSDKLIARKKDWDPKKYGGFDSPTVAYSVLVVAKVEKGKSKKLKSVKELLGITIMERSSFEKNPIDFLEAKGYKEVKKDLIIKLPKYSLFELENGRKRMLASAGELQKGNELALPSKYVNFLYLASHYEKLKGSPEDNEQKQLFVEQHKHYLDEIIEQISEFSKRVILADANLDKVLSAYNKHRDKPIREQAENIIHLFTLTNLGAPAAFKYFDTTIDRKRYTSTKEVLDATLIHQSITGLYETRIDLSQLGGDSGGSKRTADGSEFEPKKKRKV

SEQ ID NO: 152 - protein, 225 aa, synthetic construct
NVPVGFGESWKKHLSGEFGKPYFIKLMGFVAEERKHYTVYPPPHQVFTWTQMCDIKDVKVVILGQDPAHGPNQAHGLCFSVQRPVPPPPSLENIYKELSTDIEDFVHPGHGDLSGWAKQGVLLLNTVLTVRAHQANSHKERGWEQFTDAVVSWLNQNSNGLVFLLWGSYAAKKGSAIDRKRHHVLQTAHPSPLSVDRGFFGCRHFSKTNELLQKSGKKPIDWKEL

SEQ ID NO: 153 - protein, 1664 aa, synthetic construct
MKRTADGSEFESPKKKRKVNVPVGFGESWKKHLSGEFGKPYFIKLMGFVAEERKHYTVYPPPHQVFTWTQMCDIKDVKVVILGQDPAHGPNQAHGLCFSVQRPVPPPPSLENIYKELSTDIEDFVHPGHGDLSGWAKQGVLLLNTVLTVRAHQANSHKERGWEQFTDAVVSWLNQNSNGLVFLLWGSYAAKKGSAIDRKRHHVLQTAHPSPLSVDRGFFGCRHFSKTNELLQKSGKKPIDWKELSGGSSGGSSGSETPGTSESATPESSGGSSGGSDKKYSIGLAIGTNSVGWAVITDEYKVPSKKFKVLGNTDRHSIKKNLIGALLFDSGETAEATRLKRTARRRYTRRKNRICYLQEIFSNEMAKVDDSFFHRLEESFLVEEDKKHERHPIFGNIVDEVAYHEKYPTIYHLRKKLVDSTDKADLRLIYLALAHMIKFRGHFLIEGDLNPDNSDVDKLFIQLVQTYNQLFEENPINASGVDAKAILSARLSKSRRLENLIAQLPGEKKNGLFGNLIALSLGLTPNFKSNFDLAEDAKLQLSKDTYDDDLDNLLAQIGDQYADLFLAAKNLSDAILLSDILRVNTEITKAPLSASMIKRYDEHHQDLTLLKALVRQQLPEKYKEIFFDQSKNGYAGYIDGGASQEEFYKFIKPILEKMDGTEELLVKLNREDLLRKQRTFDNGSIPHQIHLGELHAILRRQEDFYPFLKDNREKIEKILTFRIPYYVGPLARGNSRFAWMTRKSEETITPWNFEEVVDKGASAQSFIERMTNFDKNLPNEKVLPKHSLLYEYFTVYNELTKVKYVTEGMRKPAFLSGEQKKAIVDLLFKTNRKVTVKQLKEDYFKKIECFDSVEISGVEDRFNASLGTYHDLLKIIKDKDFLDNEENEDILEDIVLTLTLFEDREMIEERLKTYAHLFDDKVMKQLKRRRYTGWGRLSRKLINGIRDKQSGKTILDFLKSDGFANRNFMQLIHDDSLTFKEDIQKAQVSGQGDSLHEHIANLAGSPAIKKGILQTVKVVDELVKVMGRHKPENIVIEMARENQTTQKGQKNSRERMKRIEEGIKELGSQILKEHPVENTQLQNEKLYLYYLQNGRDMYVDQELDINRLSDYDVDHIVPQSFLKDDSIDNKVLTRSDKNRGKSDNVPSEEVVKKMKNYWRQLLNAKLITQRKFDNLTKAERGGLSELDKAGFIKRQLVETRQITKHVAQILDSRMNTKYDENDKLIREVKVITLKSKLVSDFRKDFQFYKVREINNYHHAHDAYLNAVVGTALIKKYPKLESEFVYGDYKVYDVRKMIAKSEQEIGKATAKYFFYSNIMNFFKTEITLANGEIRKRPLIETNGETGEIVWDKGRDFATVRKVLSMPQVNIVKKTEVQTGGFSKESILPKRNSDKLIARKKDWDPKKYGGFDSPTVAYSVLVVAKVEKGKSKKLKSVKELLGITIMERSSFEKNPIDFLEAKGYKEVKKDLIIKLPKYSLFELENGRKRMLASAGELQKGNELALPSKYVNFLYLASHYEKLKGSPEDNEQKQLFVEQHKHYLDEIIEQISEFSKRVILADANLDKVLSAYNKHRDKPIREQAENIIHLFTLTNLGAPAAFKYFDTTIDRKRYTSTKEVLDATLIHQSITGLYETRIDLSQLGGDSGGSKRTADGSEFEPKKKRKV

SEQ ID NO: 154 - protein, 1664 aa, synthetic construct
MKRTADGSEFESPKKKRKVNVPVGFGESWKKHLSGEFGKPYFIKLMGFVAEERKHYTVYPPPHQVFTWTQMCDIKDVKVVILGQDPYHGPNQAHGLCFSVQRPVPPPPSLENIYKELSTDIEDFVHPGHGDLSGWAKQGVLLLDAVLTVRAHQANSHKERGWEQFTDAVVSWLNQNSNGLVFLLWGSYAQKKGSAIDRKRHHVLQTAHPSPLSVYRGFFGCRHFSKTNELLQKSGKKPIDWKELSGGSSGGSSGSETPGTSESATPESSGGSSGGSDKKYSIGLAIGTNSVGWAVITDEYKVPSKKFKVLGNTDRHSIKKNLIGALLFDSGETAEATRLKRTARRRYTRRKNRICYLQEIFSNEMAKVDDSFFHRLEESFLVEEDKKHERHPIFGNIVDEVAYHEKYPTIYHLRKKLVDSTDKADLRLIYLALAHMIKFRGHFLIEGDLNPDNSDVDKLFIQLVQTYNQLFEENPINASGVDAKAILSARLSKSRRLENLIAQLPGEKKNGLFGNLIALSLGLTPNFKSNFDLAEDAKLQLSKDTYDDDLDNLLAQIGDQYADLFLAAKNLSDAILLSDILRVNTEITKAPLSASMIKRYDEHHQDLTLLKALVRQQLPEKYKEIFFDQSKNGYAGYIDGGASQEEFYKFIKPILEKMDGTEELLVKLNREDLLRKQRTFDNGSIPHQIHLGELHAILRRQEDFYPFLKDNREKIEKILTFRIPYYVGPLARGNSRFAWMTRKSEETITPWNFEEVVDKGASAQSFIERMTNFDKNLPNEKVLPKHSLLYEYFTVYNELTKVKYVTEGMRKPAFLSGEQKKAIVDLLFKTNRKVTVKQLKEDYFKKIECFDSVEISGVEDRFNASLGTYHDLLKIIKDKDFLDNEENEDILEDIVLTLTLFEDREMIEERLKTYAHLFDDKVMKQLKRRRYTGWGRLSRKLINGIRDKQSGKTILDFLKSDGFANRNFMQLIHDDSLTFKEDIQKAQVSGQGDSLHEHIANLAGSPAIKKGILQTVKVVDELVKVMGRHKPENIVIEMARENQTTQKGQKNSRERMKRIEEGIKELGSQILKEHPVENTQLQNEKLYLYYLQNGRDMYVDQELDINRLSDYDVDHIVPQSFLKDDSIDNKVLTRSDKNRGKSDNVPSEEVVKKMKNYWRQLLNAKLITQRKFDNLTKAERGGLSELDKAGFIKRQLVETRQITKHVAQILDSRMNTKYDENDKLIREVKVITLKSKLVSDFRKDFQFYKVREINNYHHAHDAYLNAVVGTALIKKYPKLESEFVYGDYKVYDVRKMIAKSEQEIGKATAKYFFYSNIMNFFKTEITLANGEIRKRPLIETNGETGEIVWDKGRDFATVRKVLSMPQVNIVKKTEVQTGGFSKESILPKRNSDKLIARKKDWDPKKYGGFDSPTVAYSVLVVAKVEKGKSKKLKSVKELLGITIMERSSFEKNPIDFLEAKGYKEVKKDLIIKLPKYSLFELENGRKRMLASAGELQKGNELALPSKYVNFLYLASHYEKLKGSPEDNEQKQLFVEQHKHYLDEIIEQISEFSKRVILADANLDKVLSAYNKHRDKPIREQAENIIHLFTLTNLGAPAAFKYFDTTIDRKRYTSTKEVLDATLIHQSITGLYETRIDLSQLGGDSGGSKRTADGSEFEPKKKRKV

SEQ ID NO: 155 - protein, 225 aa, synthetic construct
NVPVGFGESWKKHLSGEFGKPYFIKLMGFVAEERKHYTVYPPPHQVFTWTQMCDIKDVKVVILGQDPYHGPNQAHGLCFSVQRPVPPPPSLENIYKELSTDIEDFVHPGHGDLSGWAKQGVLLLDVVLTVRAHQANSHKERGWEQFTDAVVSWLNQNSNGLVFLLWGSYAQKKGSAIDRKRHHVLQTAHPSPLSVYRGFFGCRHFSKTNELLQKSGKKPIDWKEL

SEQ ID NO: 156 - protein, 1664 aa, synthetic construct
MKRTADGSEFESPKKKRKVNVPVGFGESWKKHLSGEFGKPYFIKLMGFVAEERKHYTVYPPPHQVFTWTQMCDIKDVKVVILGQDPYHGPNQAHGLCFSVQRPVPPPPSLENIYKELSTDIEDFVHPGHGDLSGWAKQGVLLLDVVLTVRAHQANSHKERGWEQFTDAVVSWLNQNSNGLVFLLWGSYAQKKGSAIDRKRHHVLQTAHPSPLSVYRGFFGCRHFSKTNELLQKSGKKPIDWKELSGGSSGGSSGSETPGTSESATPESSGGSSGGSDKKYSIGLAIGTNSVGWAVITDEYKVPSKKFKVLGNTDRHSIKKNLIGALLFDSGETAEATRLKRTARRRYTRRKNRICYLQEIFSNEMAKVDDSFFHRLEESFLVEEDKKHERHPIFGNIVDEVAYHEKYPTIYHLRKKLVDSTDKADLRLIYLALAHMIKFRGHFLIEGDLNPDNSDVDKLFIQLVQTYNQLFEENPINASGVDAKAILSARLSKSRRLENLIAQLPGEKKNGLFGNLIALSLGLTPNFKSNFDLAEDAKLQLSKDTYDDDLDNLLAQIGDQYADLFLAAKNLSDAILLSDILRVNTEITKAPLSASMIKRYDEHHQDLTLLKALVRQQLPEKYKEIFFDQSKNGYAGYIDGGASQEEFYKFIKPILEKMDGTEELLVKLNREDLLRKQRTFDNGSIPHQIHLGELHAILRRQEDFYPFLKDNREKIEKILTFRIPYYVGPLARGNSRFAWMTRKSEETITPWNFEEVVDKGASAQSFIERMTNFDKNLPNEKVLPKHSLLYEYFTVYNELTKVKYVTEGMRKPAFLSGEQKKAIVDLLFKTNRKVTVKQLKEDYFKKIECFDSVEISGVEDRFNASLGTYHDLLKIIKDKDFLDNEENEDILEDIVLTLTLFEDREMIEERLKTYAHLFDDKVMKQLKRRRYTGWGRLSRKLINGIRDKQSGKTILDFLKSDGFANRNFMQLIHDDSLTFKEDIQKAQVSGQGDSLHEHIANLAGSPAIKKGILQTVKVVDELVKVMGRHKPENIVIEMARENQTTQKGQKNSRERMKRIEEGIKELGSQILKEHPVENTQLQNEKLYLYYLQNGRDMYVDQELDINRLSDYDVDHIVPQSFLKDDSIDNKVLTRSDKNRGKSDNVPSEEVVKKMKNYWRQLLNAKLITQRKFDNLTKAERGGLSELDKAGFIKRQLVETRQITKHVAQILDSRMNTKYDENDKLIREVKVITLKSKLVSDFRKDFQFYKVREINNYHHAHDAYLNAVVGTALIKKYPKLESEFVYGDYKVYDVRKMIAKSEQEIGKATAKYFFYSNIMNFFKTEITLANGEIRKRPLIETNGETGEIVWDKGRDFATVRKVLSMPQVNIVKKTEVQTGGFSKESILPKRNSDKLIARKKDWDPKKYGGFDSPTVAYSVLVVAKVEKGKSKKLKSVKELLGITIMERSSFEKNPIDFLEAKGYKEVKKDLIIKLPKYSLFELENGRKRMLASAGELQKGNELALPSKYVNFLYLASHYEKLKGSPEDNEQKQLFVEQHKHYLDEIIEQISEFSKRVILADANLDKVLSAYNKHRDKPIREQAENIIHLFTLTNLGAPAAFKYFDTTIDRKRYTSTKEVLDATLIHQSITGLYETRIDLSQLGGDSGGSKRTADGSEFEPKKKRKV

SEQ ID NO: 157 - protein, 225 aa, synthetic construct
NVPVGFGESWKKHLSGEFGKPYFIKLMGFVAEERKHYTVYPPPHQVFTWTQMCDIKDVKVVILGQDPYHGPNQAHGLCFSVQRPVPPPPSLENIYAELSTDIEDFVHPGHGDLSGWAKQGVLLLDAVLTVRAHQANSHKERGWEQFTDAVVSWLNQNSNGLVFLLWGSYAQKKGSAIDRKRHHVLQTAHPSPLSVYRGFFGCRHFSKTNELLQKSGKKPIDWKEL

SEQ ID NO: 158 - protein, 1664 aa, synthetic construct
MKRTADGSEFESPKKKRKVNVPVGFGESWKKHLSGEFGKPYFIKLMGFVAEERKHYTVYPPPHQVFTWTQMCDIKDVKVVILGQDPYHGPNQAHGLCFSVQRPVPPPPSLENIYAELSTDIEDFVHPGHGDLSGWAKQGVLLLDAVLTVRAHQANSHKERGWEQFTDAVVSWLNQNSNGLVFLLWGSYAQKKGSAIDRKRHHVLQTAHPSPLSVYRGFFGCRHFSKTNELLQKSGKKPIDWKELSGGSSGGSSGSETPGTSESATPESSGGSSGGSDKKYSIGLAIGTNSVGWAVITDEYKVPSKKFKVLGNTDRHSIKKNLIGALLFDSGETAEATRLKRTARRRYTRRKNRICYLQEIFSNEMAKVDDSFFHRLEESFLVEEDKKHERHPIFGNIVDEVAYHEKYPTIYHLRKKLVDSTDKADLRLIYLALAHMIKFRGHFLIEGDLNPDNSDVDKLFIQLVQTYNQLFEENPINASGVDAKAILSARLSKSRRLENLIAQLPGEKKNGLFGNLIALSLGLTPNFKSNFDLAEDAKLQLSKDTYDDDLDNLLAQIGDQYADLFLAAKNLSDAILLSDILRVNTEITKAPLSASMIKRYDEHHQDLTLLKALVRQQLPEKYKEIFFDQSKNGYAGYIDGGASQEEFYKFIKPILEKMDGTEELLVKLNREDLLRKQRTFDNGSIPHQIHLGELHAILRRQEDFYPFLKDNREKIEKILTFRIPYYVGPLARGNSRFAWMTRKSEETITPWNFEEVVDKGASAQSFIERMTNFDKNLPNEKVLPKHSLLYEYFTVYNELTKVKYVTEGMRKPAFLSGEQKKAIVDLLFKTNRKVTVKQLKEDYFKKIECFDSVEISGVEDRFNASLGTYHDLLKIIKDKDFLDNEENEDILEDIVLTLTLFEDREMIEERLKTYAHLFDDKVMKQLKRRRYTGWGRLSRKLINGIRDKQSGKTILDFLKSDGFANRNFMQLIHDDSLTFKEDIQKAQVSGQGDSLHEHIANLAGSPAIKKGILQTVKVVDELVKVMGRHKPENIVIEMARENQTTQKGQKNSRERMKRIEEGIKELGSQILKEHPVENTQLQNEKLYLYYLQNGRDMYVDQELDINRLSDYDVDHIVPQSFLKDDSIDNKVLTRSDKNRGKSDNVPSEEVVKKMKNYWRQLLNAKLITQRKFDNLTKAERGGLSELDKAGFIKRQLVETRQITKHVAQILDSRMNTKYDENDKLIREVKVITLKSKLVSDFRKDFQFYKVREINNYHHAHDAYLNAVVGTALIKKYPKLESEFVYGDYKVYDVRKMIAKSEQEIGKATAKYFFYSNIMNFFKTEITLANGEIRKRPLIETNGETGEIVWDKGRDFATVRKVLSMPQVNIVKKTEVQTGGFSKESILPKRNSDKLIARKKDWDPKKYGGFDSPTVAYSVLVVAKVEKGKSKKLKSVKELLGITIMERSSFEKNPIDFLEAKGYKEVKKDLIIKLPKYSLFELENGRKRMLASAGELQKGNELALPSKYVNFLYLASHYEKLKGSPEDNEQKQLFVEQHKHYLDEIIEQISEFSKRVILADANLDKVLSAYNKHRDKPIREQAENIIHLFTLTNLGAPAAFKYFDTTIDRKRYTSTKEVLDATLIHQSITGLYETRIDLSQLGGDSGGSKRTADGSEFEPKKKRKV

SEQ ID NO: 159 - protein, 225 aa, synthetic construct
NVPVGFGESWKKHLSGEFGKPYFIKLMGFVAEERKHYTVYPPPHQVFTWTQMCDIKDVKVVILGQDPYHGPNQAHGLCFSVQRPVPPPPSLENIYAELSTDIEDFVHPGHGDLSGWAKQGVLLLDVVLTVRAHQANSHKERGWEQFTDAVVSWLNQNSNGLVFLLWGSYAQKKGSAIDRKRHHVLQTAHPSPLSVYRGFFGCRHFSKTNELLQKSGKKPIDWKEL

SEQ ID NO: 160 - protein, 1664 aa, synthetic construct
MKRTADGSEFESPKKKRKVNVPVGFGESWKKHLSGEFGKPYFIKLMGFVAEERKHYTVYPPPHQVFTWTQMCDIKDVKVVILGQDPYHGPNQAHGLCFSVQRPVPPPPSLENIYAELSTDIEDFVHPGHGDLSGWAKQGVLLLDVVLTVRAHQANSHKERGWEQFTDAVVSWLNQNSNGLVFLLWGSYAQKKGSAIDRKRHHVLQTAHPSPLSVYRGFFGCRHFSKTNELLQKSGKKPIDWKELSGGSSGGSSGSETPGTSESATPESSGGSSGGSDKKYSIGLAIGTNSVGWAVITDEYKVPSKKFKVLGNTDRHSIKKNLIGALLFDSGETAEATRLKRTARRRYTRRKNRICYLQEIFSNEMAKVDDSFFHRLEESFLVEEDKKHERHPIFGNIVDEVAYHEKYPTIYHLRKKLVDSTDKADLRLIYLALAHMIKFRGHFLIEGDLNPDNSDVDKLFIQLVQTYNQLFEENPINASGVDAKAILSARLSKSRRLENLIAQLPGEKKNGLFGNLIALSLGLTPNFKSNFDLAEDAKLQLSKDTYDDDLDNLLAQIGDQYADLFLAAKNLSDAILLSDILRVNTEITKAPLSASMIKRYDEHHQDLTLLKALVRQQLPEKYKEIFFDQSKNGYAGYIDGGASQEEFYKFIKPILEKMDGTEELLVKLNREDLLRKQRTFDNGSIPHQIHLGELHAILRRQEDFYPFLKDNREKIEKILTFRIPYYVGPLARGNSRFAWMTRKSEETITPWNFEEVVDKGASAQSFIERMTNFDKNLPNEKVLPKHSLLYEYFTVYNELTKVKYVTEGMRKPAFLSGEQKKAIVDLLFKTNRKVTVKQLKEDYFKKIECFDSVEISGVEDRFNASLGTYHDLLKIIKDKDFLDNEENEDILEDIVLTLTLFEDREMIEERLKTYAHLFDDKVMKQLKRRRYTGWGRLSRKLINGIRDKQSGKTILDFLKSDGFANRNFMQLIHDDSLTFKEDIQKAQVSGQGDSLHEHIANLAGSPAIKKGILQTVKVVDELVKVMGRHKPENIVIEMARENQTTQKGQKNSRERMKRIEEGIKELGSQILKEHPVENTQLQNEKLYLYYLQNGRDMYVDQELDINRLSDYDVDHIVPQSFLKDDSIDNKVLTRSDKNRGKSDNVPSEEVVKKMKNYWRQLLNAKLITQRKFDNLTKAERGGLSELDKAGFIKRQLVETRQITKHVAQILDSRMNTKYDENDKLIREVKVITLKSKLVSDFRKDFQFYKVREINNYHHAHDAYLNAVVGTALIKKYPKLESEFVYGDYKVYDVRKMIAKSEQEIGKATAKYFFYSNIMNFFKTEITLANGEIRKRPLIETNGETGEIVWDKGRDFATVRKVLSMPQVNIVKKTEVQTGGFSKESILPKRNSDKLIARKKDWDPKKYGGFDSPTVAYSVLVVAKVEKGKSKKLKSVKELLGITIMERSSFEKNPIDFLEAKGYKEVKKDLIIKLPKYSLFELENGRKRMLASAGELQKGNELALPSKYVNFLYLASHYEKLKGSPEDNEQKQLFVEQHKHYLDEIIEQISEFSKRVILADANLDKVLSAYNKHRDKPIREQAENIIHLFTLTNLGAPAAFKYFDTTIDRKRYTSTKEVLDATLIHQSITGLYETRIDLSQLGGDSGGSKRTADGSEFEPKKKRKV

SEQ ID NO: 161 - protein, 1700 aa, synthetic construct
MKRTADGSEFESPKKKRKVSGGSDKKYSIGLAIGTNSVGWAVITDEYKVPSKKFKVLGNTDRHSIKKNLIGALLFDSGETAEATRLKRTARRRYTRRKNRICYLQEIFSNEMAKVDDSFFHRLEESFLVEEDKKHERHPIFGNIVDEVAYHEKYPTIYHLRKKLVDSTDKADLRLIYLALAHMIKFRGHFLIEGDLNPDNSDVDKLFIQLVQTYNQLFEENPINASGVDAKAILSARLSKSRRLENLIAQLPGEKKNGLFGNLIALSLGLTPNFKSNFDLAEDAKLQLSKDTYDDDLDNLLAQIGDQYADLFLAAKNLSDAILLSDILRVNTEITKAPLSASMIKRYDEHHQDLTLLKALVRQQLPEKYKEIFFDQSKNGYAGYIDGGASQEEFYKFIKPILEKMDGTEELLVKLNREDLLRKQRTFDNGSIPHQIHLGELHAILRRQEDFYPFLKDNREKIEKILTFRIPYYVGPLARGNSRFAWMTRKSEETITPWNFEEVVDKGASAQSFIERMTNFDKNLPNEKVLPKHSLLYEYFTVYNELTKVKYVTEGMRKPAFLSGEQKKAIVDLLFKTNRKVTVKQLKEDYFKKIECFDSVEISGVEDRFNASLGTYHDLLKIIKDKDFLDNEENEDILEDIVLTLTLFEDREMIEERLKTYAHLFDDKVMKQLKRRRYTGWGRLSRKLINGIRDKQSGKTILDFLKSDGFANRNFMQLIHDDSLTFKEDIQKAQVSGQGDSLHEHIANLAGSPAIKKGILQTVKVVDELVKVMGRHKPENIVIEMARENQTTQKGQKNSRERMKRIEEGIKELGSQILKEHPVENTQLQNEKLYLYYLQNGRDMYVDQELDINRLSDYDVDHIVPQSFLKDDSIDNKVLTRSDKNRGKSDNVPSEEVVKKMKNYWRQLLNAKLITQRKFDNLTKAERGGLSELDKAGFIKRQLVETRQITKHVAQILDSRMNTKYDENDKLIREVKVITLKSKLVSDFRKDFQFYKVREINNYHHAHDAYLNAVVGTALIKKYPKLESEFVYGDYKVYDVRKMIAKSEQEIGKATAKYFFYSNIMNFFKTEITLANGEIRKRPLIETNGETGEIVWDKGRDFATVRKVLSMPQVNIVKKTEVQTGGFSKESILPKRNSDKLIARKKDWDPKKYGGFDSPTVAYSVLVVAKVEKGKSKKLKSVKELLGITIMERSSFEKNPIDFLEAKGYKEVKKDLIIKLPKYSLFELENGRKRMLASAGELQKGNELALPSKYVNFLYLASHYEKLKGSSGGSSGGSSGSETPGTSESATPESSGGSSGGSNVPVGFGESWKKHLSGEFGKPYFIKLMGFVAEERKHYTVYPPPHQVFTWTQMCDIKDVKVVILGQDPAHGPNQAHGLCFSVQRPVPPPPSLENIYKELSTDIEDFVHPGHGDLSGWAKQGVLLLNTVLTVRAHQANSHKERGWEQFTDAVVSWLNQNSNGLVFLLWGSYAAKKGSAIDRKRHHVLQTAHPSPLSVDRGFFGCRHFSKTNELLQKSGKKPIDWKELSGGSSGGSSGSETPGTSESATPESSGGSSGGSPEDNEQKQLFVEQHKHYLDEIIEQISEFSKRVILADANLDKVLSAYNKHRDKPIREQAENIIHLFTLTNLGAPAAFKYFDTTIDRKRYTSTKEVLDATLIHQSITGLYETRIDLSQLGGDSGGSKRTADGSEFEPKKKRKV

SEQ ID NO: 162 - protein, 1684 aa, synthetic construct
MKRTADGSEFESPKKKRKVSGGSDKKYSIGLAIGTNSVGWAVITDEYKVPSKKFKVLGNTDRHSIKKNLIGALLFDSGETAEATRLKRTARRRYTRRKNRICYLQEIFSNEMAKVDDSFFHRLEESFLVEEDKKHERHPIFGNIVDEVAYHEKYPTIYHLRKKLVDSTDKADLRLIYLALAHMIKFRGHFLIEGDLNPDNSDVDKLFIQLVQTYNQLFEENPINASGVDAKAILSARLSKSRRLENLIAQLPGEKKNGLFGNLIALSLGLTPNFKSNFDLAEDAKLQLSKDTYDDDLDNLLAQIGDQYADLFLAAKNLSDAILLSDILRVNTEITKAPLSASMIKRYDEHHQDLTLLKALVRQQLPEKYKEIFFDQSKNGYAGYIDGGASQEEFYKFIKPILEKMDGTEELLVKLNREDLLRKQRTFDNGSIPHQIHLGELHAILRRQEDFYPFLKDNREKIEKILTFRIPYYVGPLARGNSRFAWMTRKSEETITPWNFEEVVDKGASAQSFIERMTNFDKNLPNEKVLPKHSLLYEYFTVYNELTKVKYVTEGMRKPAFLSGEQKKAIVDLLFKTNRKVTVKQLKEDYFKKIECFDSVEISGVEDRFNASLGTYHDLLKIIKDKDFLDNEENEDILEDIVLTLTLFEDREMIEERLKTYAHLFDDKVMKQLKRRRYTGWGRLSRKLINGIRDKQSGKTILDFLKSDGFANRNFMQLIHDDSLTFKEDIQKAQVSGQGDSLHEHIANLAGSPAIKKGILQTVKVVDELVKVMGRHKPENIVIEMARENQTTQKGQKNSRERMKRIEEGIKELGSQILKEHPVENTQLQNEKLYLYYLQNGRDMYVDQELDINRLSDYDVDHIVPQSFLKDDSIDNKVLTRSDKNRGKSDNVPSEEVVKKMKNYWRQLLNAKLITQRKFDNLTKAERGGLSELDKAGFIKRQLVETRQITKHVAQILDSRMNTKYDENDKLIREVKVITLKSKLVSDFRKDFQFYKVREINNYHHAHDAYLNAVVGTALIKKYPKLESEFVYGDYKVYDVRKMIAKSEQEIGKATAKYFFYSNIMNFFKSGGSSGGSSGSETPGTSESATPESSGGSSGGSNVPVGFGESWKKHLSGEFGKPYFIKLMGFVAEERKHYTVYPPPHQVFTWTQMCDIKDVKVVILGQDPAHGPNQAHGLCFSVQRPVPPPPSLENIYKELSTDIEDFVHPGHGDLSGWAKQGVLLLNTVLTVRAHQANSHKERGWEQFTDAVVSWLNQNSNGLVFLLWGSYAAKKGSAIDRKRHHVLQTAHPSPLSVDRGFFGCRHFSKTNELLQKSGKKPIDWKELSGGSSGGSSGSETPGTSESATPESSGGSSGGSETNGETGEIVWDKGRDFATVRKVLSMPQVNIVKKTEVQTGGFSKESILPKRNSDKLIARKKDWDPKKYGGFDSPTVAYSVLVVAKVEKGKSKKLKSVKELLGITIMERSSFEKNPIDFLEAKGYKEVKKDLIIKLPKYSLFELENGRKRMLASAGELQKGNELALPSKYVNFLYLASHYEKLKGSPEDNEQKQLFVEQHKHYLDEIIEQISEFSKRVILADANLDKVLSAYNKHRDKPIREQAENIIHLFTLTNLGAPAAFKYFDTTIDRKRYTSTKEVLDATLIHQSITGLYETRIDLSQLGGDSGGSKRTADGSEFEPKKKRKV

SEQ ID NO: 163 - protein, 1367 aa, synthetic construct
DKKYSIGLAIGTNSVGWAVITDEYKVPSKKFKVLGNTDRHSIKKNLIGALLFDSGETAEATRLKRTARRRYTRRKNRICYLQEIFSNEMAKVDDSFFHRLEESFLVEEDKKHERHPIFGNIVDEVAYHEKYPTIYHLRKKLVDSTDKADLRLIYLALAHMIKFRGHFLIEGDLNPDNSDVDKLFIQLVQTYNQLFEENPINASGVDAKAILSARLSKSRRLENLIAQLPGEKKNGLFGNLIALSLGLTPNFKSNFDLAEDAKLQLSKDTYDDDLDNLLAQIGDQYADLFLAAKNLSDAILLSDILRVNTEITKAPLSASMIKRYDEHHQDLTLLKALVRQQLPEKYKEIFFDQSKNGYAGYIDGGASQEEFYKFIKPILEKMDGTEELLVKLNREDLLRKQRTFDNGSIPHQIHLGELHAILRRQEDFYPFLKDNREKIEKILTFRIPYYVGPLARGNSRFAWMTRKSEETITPWNFEEVVDKGASAQSFIERMTNFDKNLPNEKVLPKHSLLYEYFTVYNELTKVKYVTEGMRKPAFLSGEQKKAIVDLLFKTNRKVTVKQLKEDYFKKIECFDSVEISGVEDRFNASLGTYHDLLKIIKDKDFLDNEENEDILEDIVLTLTLFEDREMIEERLKTYAHLFDDKVMKQLKRRRYTGWGRLSRKLINGIRDKQSGKTILDFLKSDGFANRNFMQLIHDDSLTFKEDIQKAQVSGQGDSLHEHIANLAGSPAIKKGILQTVKVVDELVKVMGRHKPENIVIEMARENQTTQKGQKNSRERMKRIEEGIKELGSQILKEHPVENTQLQNEKLYLYYLQNGRDMYVDQELDINRLSDYDVDHIVPQSFLKDDSIDNKVLTRSDKNRGKSDNVPSEEVVKKMKNYWRQLLNAKLITQRKFDNLTKAERGGLSELDKAGFIKRQLVETRQITKHVAQILDSRMNTKYDENDKLIREVKVITLKSKLVSDFRKDFQFYKVREINNYHHAHDAYLNAVVGTALIKKYPKLESEFVYGDYKVYDVRKMIAKSEQEIGKATAKYFFYSNIMNFFKTEITLANGEIRKRPLIETNGETGEIVWDKGRDFATVRKVLSMPQVNIVKKTEVQTGGFSKESILPKRNSDKLIARKKDWDPKKYGGFLWPTVAYSVLVVAKVEKGKSKKLKSVKELLGITIMERSSFEKNPIDFLEAKGYKEVKKDLIIKLPKYSLFELENGRKRMLASAKQLQKGNELALPSKYVNFLYLASHYEKLKGSPEDNEQKQLFVEQHKHYLDEIIEQISEFSKRVILADANLDKVLSAYNKHRDKPIREQAENIIHLFTLTNLGAPAAFKYFDTTIDRKQYRSTKEVLDATLIHQSITGLYETRIDLSQLGGD

SEQ ID NO: 164 - protein, 1684 aa, synthetic construct
MKRTADGSEFESPKKKRKVSGGSDKKYSIGLAIGTNSVGWAVITDEYKVPSKKFKVLGNTDRHSIKKNLIGALLFDSGETAEATRLKRTARRRYTRRKNRICYLQEIFSNEMAKVDDSFFHRLEESFLVEEDKKHERHPIFGNIVDEVAYHEKYPTIYHLRKKLVDSTDKADLRLIYLALAHMIKFRGHFLIEGDLNPDNSDVDKLFIQLVQTYNQLFEENPINASGVDAKAILSARLSKSRRLENLIAQLPGEKKNGLFGNLIALSLGLTPNFKSNFDLAEDAKLQLSKDTYDDDLDNLLAQIGDQYADLFLAAKNLSDAILLSDILRVNTEITKAPLSASMIKRYDEHHQDLTLLKALVRQQLPEKYKEIFFDQSKNGYAGYIDGGASQEEFYKFIKPILEKMDGTEELLVKLNREDLLRKQRTFDNGSIPHQIHLGELHAILRRQEDFYPFLKDNREKIEKILTFRIPYYVGPLARGNSRFAWMTRKSEETITPWNFEEVVDKGASAQSFIERMTNFDKNLPNEKVLPKHSLLYEYFTVYNELTKVKYVTEGMRKPAFLSGEQKKAIVDLLFKTNRKVTVKQLKEDYFKKIECFDSVEISGVEDRFNASLGTYHDLLKIIKDKDFLDNEENEDILEDIVLTLTLFEDREMIEERLKTYAHLFDDKVMKQLKRRRYTGWGRLSRKLINGIRDKQSGKTILDFLKSDGFANRNFMQLIHDDSLTFKEDIQKAQVSGQGDSLHEHIANLAGSPAIKKGILQTVKVVDELVKVMGRHKPENIVIEMARENQTTQKGQKNSRERMKRIEEGIKELGSQILKEHPVENTQLQNEKLYLYYLQNGRDMYVDQELDINRLSDYDVDHIVPQSFLKDDSIDNKVLTRSDKNRGKSDNVPSEEVVKKMKNYWRQLLNAKLITQRKFDNLTKAERGGLSELDKAGFIKRQLVETRQITKHVAQILDSRMNTKYDENDKLIREVKVITLKSKLVSDFRKDFQFYKVREINNYHHAHDAYLNAVVGTALIKKYPKLESEFVYGDYKVYDVRKMIAKSEQEIGKATAKYFFYSNIMNFFKSGGSSGGSSGSETPGTSESATPESSGGSSGGSNVPVGFGESWKKHLSGEFGKPYFIKLMGFVAEERKHYTVYPPPHQVFTWTQMCDIKDVKVVILGQDPYHGPNQAHGLCFSVQRPVPPPPSLENIYAELSTDIEDFVHPGHGDLSGWAKQGVLLLDVVLTVRAHQANSHKERGWEQFTDAVVSWLNQNSNGLVFLLWGSYAQKKGSAIDRKRHHVLQTAHPSPLSVYRGFFGCRHFSKTNELLQKSGKKPIDWKELSGGSSGGSSGSETPGTSESATPESSGGSSGGSETNGETGEIVWDKGRDFATVRKVLSMPQVNIVKKTEVQTGGFSKESILPKRNSDKLIARKKDWDPKKYGGFDSPTVAYSVLVVAKVEKGKSKKLKSVKELLGITIMERSSFEKNPIDFLEAKGYKEVKKDLIIKLPKYSLFELENGRKRMLASAGELQKGNELALPSKYVNFLYLASHYEKLKGSPEDNEQKQLFVEQHKHYLDEIIEQISEFSKRVILADANLDKVLSAYNKHRDKPIREQAENIIHLFTLTNLGAPAAFKYFDTTIDRKRYTSTKEVLDATLIHQSITGLYETRIDLSQLGGDSGGSKRTADGSEFEPKKKRKV

SEQ ID NO: 165 - skipped

SEQ ID NO: 166 - RNA, 20 nt, synthetic construct
  source 1..20: mol_type = other RNA
acagtaagagcataatgggg

SEQ ID NO: 167 - RNA, 20 nt, synthetic construct
  source 1..20: mol_type = other RNA
taagcatagactccaggata

SEQ ID NO: 168 - RNA, 20 nt, synthetic construct
  source 1..20: mol_type = other RNA
atagtctacatttatagtgc

SEQ ID NO: 169 - RNA, 20 nt, synthetic construct
  source 1..20: mol_type = other RNA
ggcctctattgttggtagaa

SEQ ID NO: 170 - RNA, 20 nt, synthetic construct
  source 1..20: mol_type = other RNA
catccctacctagccagatg

SEQ ID NO: 171 - RNA, 20 nt, synthetic construct
  source 1..20: mol_type = other RNA
gctggctcaggttcaggaga

SEQ ID NO: 172 - RNA, 20 nt, synthetic construct
  source 1..20: mol_type = other RNA
gtcatcttagtcattacctg

SEQ ID NO: 173 - RNA, 20 nt, synthetic construct
  source 1..20: mol_type = other RNA
gctaacttactgtgtaaccc

SEQ ID NO: 174 - RNA, 20 nt, synthetic construct
  source 1..20: mol_type = other RNA
gtcttcttccgccagaccac

SEQ ID NO: 175 - RNA, 20 nt, synthetic construct
  source 1..20: mol_type = other RNA
gtcttcttctgtaacagccc

SEQ ID NO: 176 - RNA, 20 nt, synthetic construct
  source 1..20: mol_type = other RNA
gcgttcttccaccagactgc

SEQ ID NO: 177 - RNA, 20 nt, synthetic construct
  source 1..20: mol_type = other RNA
gcattaactgaaaatggtca

SEQ ID NO: 178 - RNA, 20 nt, synthetic construct
  source 1..20: mol_type = other RNA
gaaatcagaggaggaaaagt

SEQ ID NO: 179 - RNA, 20 nt, synthetic construct
  source 1..20: mol_type = other RNA
ggaatcattagctatgactt

SEQ ID NO: 180 - RNA, 20 nt, synthetic construct
  source 1..20: mol_type = other RNA
gtactcaaatgactttaaga

SEQ ID NO: 181 - RNA, 20 nt, synthetic construct
  source 1..20: mol_type = other RNA
agtctccctcagcttgaaga

SEQ ID NO: 182 - RNA, 20 nt, synthetic construct
  source 1..20: mol_type = other RNA
cgttcctggctgccaggtcg

SEQ ID NO: 183 - RNA, 20 nt, synthetic construct
  source 1..20: mol_type = other RNA
ttgctagaaaccaaacagac

SEQ ID NO: 184 - RNA, 20 nt, synthetic construct
  source 1..20: mol_type = other RNA
gttcctgtaagataccaaaa

SEQ ID NO: 185 - RNA, 20 nt, synthetic construct
  source 1..20: mol_type = other RNA
ggtagggcgacagatctaat

SEQ ID NO: 186 - RNA, 20 nt, synthetic construct
  source 1..20: mol_type = other RNA
ggacacgaagatcagctgca

SEQ ID NO: 187 - RNA, 20 nt, synthetic construct
  source 1..20: mol_type = other RNA
gtattctagaatgcagggca

SEQ ID NO: 188 - RNA, 20 nt, synthetic construct
  source 1..20: mol_type = other RNA
gtcatcttagtcattacctg

SEQ ID NO: 189 - RNA, 20 nt, synthetic construct
  source 1..20: mol_type = other RNA
gtattcatttccctagctcc

SEQ ID NO: 190 - RNA, 20 nt, synthetic construct
  source 1..20: mol_type = other RNA
gaatacttcttcagagtccc

SEQ ID NO: 191 - RNA, 20 nt, synthetic construct
  source 1..20: mol_type = other RNA
gaacacaaagcatagactgc

SEQ ID NO: 192 - RNA, 20 nt, synthetic construct
  source 1..20: mol_type = other RNA
tgcttacctgtctgtggaag

SEQ ID NO: 193 - RNA, 20 nt, synthetic construct
  source 1..20: mol_type = other RNA
gctaggatctagaagagtca

SEQ ID NO: 194 - RNA, 20 nt, synthetic construct
  source 1..20: mol_type = other RNA
tcactccctcttcaagctga

SEQ ID NO: 195 - RNA, 20 nt, synthetic construct
  source 1..20: mol_type = other RNA
aagatcaaagtgctgggctc

SEQ ID NO: 196 - RNA, 20 nt, synthetic construct
  source 1..20: mol_type = other RNA
aggccccagtggctgctctg

SEQ ID NO: 197 - RNA, 20 nt, synthetic construct
  source 1..20: mol_type = other RNA
cgttcctggctgccaggtcg

SEQ ID NO: 198 - RNA, 20 nt, synthetic construct
  source 1..20: mol_type = other RNA
acttccacatgagcgtggtc

SEQ ID NO: 199 - RNA, 20 nt, synthetic construct
  source 1..20: mol_type = other RNA
tagtccaggaggcagccgaa

SEQ ID NO: 200 - RNA, 20 nt, synthetic construct
  source 1..20: mol_type = other RNA
gagctcactgaacgctggca

SEQ ID NO: 201 - RNA, 20 nt, synthetic construct
  source 1..20: mol_type = other RNA
gatcctggccccatgcaagg

SEQ ID NO: 202 - RNA, 20 nt, synthetic construct
  source 1..20: mol_type = other RNA
acagtgagagcatcgtgggg

SEQ ID NO: 203 - RNA, 20 nt, synthetic construct
  source 1..20: mol_type = other RNA
acagtaagggcaaaatggag

SEQ ID NO: 204 - RNA, 20 nt, synthetic construct
  source 1..20: mol_type = other RNA
acaataagagcacaaagggg

SEQ ID NO: 205 - RNA, 20 nt, synthetic construct
  source 1..20: mol_type = other RNA
acagtaatagcataaaggag

SEQ ID NO: 206 - RNA, 20 nt, synthetic construct
  source 1..20: mol_type = other RNA
acaataatagcataatgggt

SEQ ID NO: 207 - RNA, 20 nt, synthetic construct
  source 1..20: mol_type = other RNA
acaggaagagcaaaatgggg

SEQ ID NO: 208 - RNA, 20 nt, synthetic construct
  source 1..20: mol_type = other RNA
acattaagtgaataatgggg

SEQ ID NO: 209 - RNA, 20 nt, synthetic construct
  source 1..20: mol_type = other RNA
acagtgagagtataaggggg

SEQ ID NO: 210 - RNA, 20 nt, synthetic construct
  source 1..20: mol_type = other RNA
agactaagagcatgatgggg

SEQ ID NO: 211 - RNA, 20 nt, synthetic construct
  source 1..20: mol_type = other RNA
ttagcagagactccaggatc

SEQ ID NO: 212 - RNA, 20 nt, synthetic construct
  source 1..20: mol_type = other RNA
taagcacaggctccagtata

SEQ ID NO: 213 - RNA, 20 nt, synthetic construct
  source 1..20: mol_type = other RNA
caggcatagactccaggaaa

SEQ ID NO: 214 - RNA, 20 nt, synthetic construct
  source 1..20: mol_type = other RNA
taagatttgactccaggata

SEQ ID NO: 215 - RNA, 20 nt, synthetic construct
  source 1..20: mol_type = other RNA
tgagcatagactccaggaga

SEQ ID NO: 216 - RNA, 20 nt, synthetic construct
  source 1..20: mol_type = other RNA
tcagcatagcctcctggata

SEQ ID NO: 217 - RNA, 20 nt, synthetic construct
  source 1..20: mol_type = other RNA
taagcatagactctaggacc

SEQ ID NO: 218 - RNA, 20 nt, synthetic construct
  source 1..20: mol_type = other RNA
taagcataggctccagcatg

SEQ ID NO: 219 - RNA, 20 nt, synthetic construct
  source 1..20: mol_type = other RNA
ttcttcttccaccagacctc

SEQ ID NO: 220 - RNA, 20 nt, synthetic construct
  source 1..20: mol_type = other RNA
atcttcttccgccagacctt

SEQ ID NO: 221 - RNA, 20 nt, synthetic construct
  source 1..20: mol_type = other RNA
gtcttcttcctcctgacaac

SEQ ID NO: 222 - RNA, 20 nt, synthetic construct
  source 1..20: mol_type = other RNA
gtcttcttcctcaagaacac

SEQ ID NO: 223 - RNA, 20 nt, synthetic construct
  source 1..20: mol_type = other RNA
gccagcttccgccagaccac

SEQ ID NO: 224 - RNA, 20 nt, synthetic construct
  source 1..20: mol_type = other RNA
ttctccttccgccagtccac

SEQ ID NO: 225 - RNA, 20 nt, synthetic construct
  source 1..20: mol_type = other RNA
atactcaaatgactttcata

SEQ ID NO: 226 - RNA, 20 nt, synthetic construct
  source 1..20: mol_type = other RNA
ggactcaaatgagtttaagt

SEQ ID NO: 227 - RNA, 20 nt, synthetic construct
  source 1..20: mol_type = other RNA
gtactcaaatgcctttaatt

SEQ ID NO: 228 - RNA, 20 nt, synthetic construct
  source 1..20: mol_type = other RNA
gtactcatattactataaga

SEQ ID NO: 229 - RNA, 20 nt, synthetic construct
  source 1..20: mol_type = other RNA
gtactgaaatgactttaaat

SEQ ID NO: 230 - RNA, 20 nt, synthetic construct
  source 1..20: mol_type = other RNA
aaactcaaatgaatttaaga

SEQ ID NO: 231 - RNA, 20 nt, synthetic construct
  source 1..20: mol_type = other RNA
ttattcaaatgactttaaaa

SEQ ID NO: 232 - RNA, 20 nt, synthetic construct
  source 1..20: mol_type = other RNA
gtagccaaatgtctttaaga

SEQ ID NO: 233 - RNA, 20 nt, synthetic construct
  source 1..20: mol_type = other RNA
ggactttaatgactttaaga

SEQ ID NO: 234 - RNA, 20 nt, synthetic construct
  source 1..20: mol_type = other RNA
gtacagaaatgactttaaaa

SEQ ID NO: 235 - RNA, 20 nt, synthetic construct
  source 1..20: mol_type = other RNA
atactcaaaagacttttaga

SEQ ID NO: 236 - RNA, 22 nt, synthetic construct
  source 1..22: mol_type = other RNA
gtggtagacagcatgtgtccta

SEQ ID NO: 237 - RNA, 22 nt, synthetic construct
  source 1..22: mol_type = other RNA
atttacagcctggcctttgggg

SEQ ID NO: 238 - RNA, 22 nt, synthetic construct
  source 1..22: mol_type = other RNA
gtgtcaggtaatgtgctaaaca

SEQ ID NO: 239 - RNA, 22 nt, synthetic construct
  source 1..22: mol_type = other RNA
ggtggaggagggtgcatggggt

SEQ ID NO: 240 - RNA, 20 nt, synthetic construct
  source 1..20: mol_type = other RNA
tctgcttctccagccctggc

SEQ ID NO: 241 - RNA, 23 nt, synthetic construct
  source 1..23: mol_type = other RNA
ggatttcagggaagatgaagggc

SEQ ID NO: 242 - RNA, 23 nt, synthetic construct
  source 1..23: mol_type = other RNA
tctccccaggaccatccacctga

SEQ ID NO: 243 - RNA, 23 nt, synthetic construct
  source 1..23: mol_type = other RNA
cttaccttggaagtggacgtagg

SEQ ID NO: 244 - RNA, 23 nt, synthetic construct
  source 1..23: mol_type = other RNA
tgccttaccttggaagtggacgt

SEQ ID NO: 245 - RNA, 23 nt, synthetic construct
  source 1..23: mol_type = other RNA
acatacctcccccaccctgatgc

SEQ ID NO: 246 - RNA, 23 nt, synthetic construct
  source 1..23: mol_type = other RNA
cacacatacctcccccaccctga

SEQ ID NO: 247 - RNA, 23 nt, synthetic construct
  source 1..23: mol_type = other RNA
tttatcagctcagaaggactagt

SEQ ID NO: 248 - RNA, 23 nt, synthetic construct
  source 1..23: mol_type = other RNA
ttctaggcattcctgctgaatgt

SEQ ID NO: 249 - RNA, 23 nt, synthetic construct
  source 1..23: mol_type = other RNA
tcctttaggaggctggtggtggc

SEQ ID NO: 250 - RNA, 23 nt, synthetic construct
  source 1..23: mol_type = other RNA
ctcctttaggaggctggtggtgg

SEQ ID NO: 251 - RNA, 23 nt, synthetic construct
  source 1..23: mol_type = other RNA
tttacctgatataacatcacagt

SEQ ID NO: 252 - RNA, 23 nt, synthetic construct
  source 1..23: mol_type = other RNA
agatacctgaataaccctctgga

SEQ ID NO: 253 - RNA, 23 nt, synthetic construct
  source 1..23: mol_type = other RNA
aagatacctgaataaccctctgg

SEQ ID NO: 254 - RNA, 23 nt, synthetic construct
  source 1..23: mol_type = other RNA
ctcaggagcttcagaggccgagg

SEQ ID NO: 255 - RNA, 23 nt, synthetic construct
  source 1..23: mol_type = other RNA
tcctcaggagcttcagaggccga

SEQ ID NO: 256 - RNA, 23 nt, synthetic construct
  source 1..23: mol_type = other RNA
tttaggggctgggtgaccgatgg

SEQ ID NO: 257 - RNA, 23 nt, synthetic construct
  source 1..23: mol_type = other RNA
tgatttaggggctgggtgaccga

SEQ ID NO: 258 - RNA, 23 nt, synthetic construct
  source 1..23: mol_type = other RNA
gcttacgggcagaggccaggagc

SEQ ID NO: 259 - RNA, 23 nt, synthetic construct
  source 1..23: mol_type = other RNA
gtgcttacgggcagaggccagga

SEQ ID NO: 260 - RNA, 23 nt, synthetic construct
  source 1..23: mol_type = other RNA
agtgcttacgggcagaggccagg

SEQ ID NO: 261 - RNA, 23 nt, synthetic construct
  source 1..23: mol_type = other RNA
cgggtgtacctggcctgctgggc

SEQ ID NO: 262 - RNA, 23 nt, synthetic construct
  source 1..23: mol_type = other RNA
ctcaggtactccaaagattcagg

SEQ ID NO: 263 - RNA, 23 nt, synthetic construct
  source 1..23: mol_type = other RNA
ttcatagatcgagacatgtaagc

SEQ ID NO: 264 - RNA, 23 nt, synthetic construct
  source 1..23: mol_type = other RNA
ctcacgctggatagcctccaggc

SEQ ID NO: 265 - RNA, 23 nt, synthetic construct
  source 1..23: mol_type = other RNA
actcacgctggatagcctccagg

SEQ ID NO: 266 - RNA, 23 nt, synthetic construct
  source 1..23: mol_type = other RNA
cttaccccacttaactatcttgg

SEQ ID NO: 267 - RNA, 23 nt, synthetic construct
  source 1..23: mol_type = other RNA
acacaggaagccctggaagctgc

SEQ ID NO: 268 - RNA, 23 nt, synthetic construct
  source 1..23: mol_type = other RNA
ctcacacaggaagccctggaagc

SEQ ID NO: 269 - RNA, 23 nt, synthetic construct
  source 1..23: mol_type = other RNA
cccacaggggccctggctatgga

SEQ ID NO: 270 - RNA, 23 nt, synthetic construct
  source 1..23: mol_type = other RNA
ccccacaggggccctggctatgg

SEQ ID NO: 271 - RNA, 23 nt, synthetic construct
  source 1..23: mol_type = other RNA
ctcactagacttgacccacaggc

SEQ ID NO: 272 - RNA, 23 nt, synthetic construct
  source 1..23: mol_type = other RNA
cctcactagacttgacccacagg

SEQ ID NO: 273 - RNA, 23 nt, synthetic construct
  source 1..23: mol_type = other RNA
ctgcagggaaacaagagaccaga

SEQ ID NO: 274 - RNA, 23 nt, synthetic construct
  source 1..23: mol_type = other RNA
catcagagtgaagacccacagga

SEQ ID NO: 275 - RNA, 23 nt, synthetic construct
  source 1..23: mol_type = other RNA
ccatcagagtgaagacccacagg

SEQ ID NO: 276 - RNA, 23 nt, synthetic construct
  source 1..23: mol_type = other RNA
ccataagaaacaccagaagaagt

SEQ ID NO: 277 - RNA, 23 nt, synthetic construct
  source 1..23: mol_type = other RNA
agtaccttcagggccatctgaga

SEQ ID NO: 278 - RNA, 23 nt, synthetic construct
  source 1..23: mol_type = other RNA
tcagtaccttcagggccatctga

SEQ ID NO: 279 - RNA, 23 nt, synthetic construct
  source 1..23: mol_type = other RNA
actcacctgcccacagcaggggc

SEQ ID NO: 280 - RNA, 23 nt, synthetic construct
  source 1..23: mol_type = other RNA
cactcacctgcccacagcagggg

SEQ ID NO: 281 - RNA, 23 nt, synthetic construct
  source 1..23: mol_type = other RNA
ccactcacctgcccacagcaggg

SEQ ID NO: 282 - RNA, 23 nt, synthetic construct
  source 1..23: mol_type = other RNA
gccactcacctgcccacagcagg

SEQ ID NO: 283 - RNA, 23 nt, synthetic construct
  source 1..23: mol_type = other RNA
ctcacctgtcacatgcacagaga

SEQ ID NO: 284 - RNA, 23 nt, synthetic construct
  source 1..23: mol_type = other RNA
gcctcacctgtcacatgcacaga

SEQ ID NO: 285 - RNA, 23 nt, synthetic construct
  source 1..23: mol_type = other RNA
acttacaggtgacgttgagctgg

SEQ ID NO: 286 - RNA, 23 nt, synthetic construct
  source 1..23: mol_type = other RNA
agcacttacaggtgacgttgagc

SEQ ID NO: 287 - RNA, 23 nt, synthetic construct
  source 1..23: mol_type = other RNA
tcctacctgagccatctcctgga

SEQ ID NO: 288 - RNA, 23 nt, synthetic construct
  source 1..23: mol_type = other RNA
ttcctacctgagccatctcctgg

SEQ ID NO: 289 - RNA, 23 nt, synthetic construct
  source 1..23: mol_type = other RNA
tgctcacatgaagaagatgaggc

SEQ ID NO: 290 - RNA, 23 nt, synthetic construct
  source 1..23: mol_type = other RNA
atgctcacatgaagaagatgagg

SEQ ID NO: 291 - RNA, 23 nt, synthetic construct
  source 1..23: mol_type = other RNA
ctcaccggggaggctgaccctgt

SEQ ID NO: 292 - RNA, 23 nt, synthetic construct
  source 1..23: mol_type = other RNA
ctgcagatcacggtcagtctagc

SEQ ID NO: 293 - RNA, 23 nt, synthetic construct
  source 1..23: mol_type = other RNA
gtgcagcatttggaagctcctga

SEQ ID NO: 294 - RNA, 23 nt, synthetic construct
  source 1..23: mol_type = other RNA
ctttgtcaggggtacatgatgga

SEQ ID NO: 295 - RNA, 23 nt, synthetic construct
  source 1..23: mol_type = other RNA
atctttcaggtgcttcaagaaga

SEQ ID NO: 296 - RNA, 23 nt, synthetic construct
  source 1..23: mol_type = other RNA
tccaggtattgggagatcgatgg

SEQ ID NO: 297 - RNA, 23 nt, synthetic construct
  source 1..23: mol_type = other RNA
ttctccaggtattgggagatcga

SEQ ID NO: 298 - RNA, 23 nt, synthetic construct
  source 1..23: mol_type = other RNA
ttctcacagatttcacaggctgt

SEQ ID NO: 299 - RNA, 23 nt, synthetic construct
  source 1..23: mol_type = other RNA
atgctgcaggccatagagcgaga

SEQ ID NO: 300 - RNA, 23 nt, synthetic construct
  source 1..23: mol_type = other RNA
tttctagagggtgttaatgcaga

SEQ ID NO: 301 - RNA, 23 nt, synthetic construct
  source 1..23: mol_type = other RNA
ggcacaggatgaagtcaaccggc

SEQ ID NO: 302 - RNA, 23 nt, synthetic construct
  source 1..23: mol_type = other RNA
tggcacaggatgaagtcaaccgg

SEQ ID NO: 303 - RNA, 23 nt, synthetic construct
  source 1..23: mol_type = other RNA
tggaaggtctatgccagaaagga

SEQ ID NO: 304 - RNA, 23 nt, synthetic construct
  source 1..23: mol_type = other RNA
gtggaaggtctatgccagaaagg

SEQ ID NO: 305 - RNA, 23 nt, synthetic construct
  source 1..23: mol_type = other RNA
tttcagagagctaaagaagaggc

SEQ ID NO: 306 - RNA, 23 nt, synthetic construct
  source 1..23: mol_type = other RNA
cttaggaagtttgggcatgttgg

SEQ ID NO: 307 - RNA, 23 nt, synthetic construct
  source 1..23: mol_type = other RNA
tttcttaggaagtttgggcatgt

SEQ ID NO: 308 - RNA, 23 nt, synthetic construct
  source 1..23: mol_type = other RNA
gtttcagtcacttgaaaatttga

SEQ ID NO: 309 - RNA, 23 nt, synthetic construct
  source 1..23: mol_type = other RNA
tcccaacagaaaatccaatctga

SEQ ID NO: 310 - RNA, 23 nt, synthetic construct
  source 1..23: mol_type = other RNA
aaacttagaacttgtataaaagt

SEQ ID NO: 311 - RNA, 23 nt, synthetic construct
  source 1..23: mol_type = other RNA
ttcacaggctactcaaaaagaga

SEQ ID NO: 312 - RNA, 23 nt, synthetic construct
  source 1..23: mol_type = other RNA
ggaatatagcgtttaaaggcaga

SEQ ID NO: 313 - RNA, 23 nt, synthetic construct
  source 1..23: mol_type = other RNA
atcagaatgaagacaatgagggt

SEQ ID NO: 314 - RNA, 23 nt, synthetic construct
  source 1..23: mol_type = other RNA
gatcagaatgaagacaatgaggg

SEQ ID NO: 315 - RNA, 23 nt, synthetic construct
  source 1..23: mol_type = other RNA
tgatcagaatgaagacaatgagg

SEQ ID NO: 316 - RNA, 23 nt, synthetic construct
  source 1..23: mol_type = other RNA
tttgatcagaatgaagacaatga

SEQ ID NO: 317 - RNA, 23 nt, synthetic construct
  source 1..23: mol_type = other RNA
aacaggatttgaggtctcaaaga

SEQ ID NO: 318 - RNA, 23 nt, synthetic construct
  source 1..23: mol_type = other RNA
gctcaataggaaattgatcggga

SEQ ID NO: 319 - RNA, 23 nt, synthetic construct
  source 1..23: mol_type = other RNA
taccagcacactgtccgtgaaga

SEQ ID NO: 320 - RNA, 23 nt, synthetic construct
  source 1..23: mol_type = other RNA
ctataccagcacactgtccgtga

SEQ ID NO: 321 - RNA, 23 nt, synthetic construct
  source 1..23: mol_type = other RNA
tattacagaatataaaagatagt

SEQ ID NO: 322 - RNA, 23 nt, synthetic construct
  source 1..23: mol_type = other RNA
tgcaggcgatttgacagatctgt

SEQ ID NO: 323 - RNA, 23 nt, synthetic construct
  source 1..23: mol_type = other RNA
tcttacaggaactccaggatggc

SEQ ID NO: 324 - RNA, 23 nt, synthetic construct
  source 1..23: mol_type = other RNA
atcttacaggaactccaggatgg

SEQ ID NO: 325 - RNA, 23 nt, synthetic construct
  source 1..23: mol_type = other RNA
ctccaggctagaagaacaaaaga

SEQ ID NO: 326 - RNA, 23 nt, synthetic construct
  source 1..23: mol_type = other RNA
gtttcagttactggtggaagagt

SEQ ID NO: 327 - RNA, 23 nt, synthetic construct
  source 1..23: mol_type = other RNA
ctgtttcagttactggtggaaga

SEQ ID NO: 328 - RNA, 23 nt, synthetic construct
  source 1..23: mol_type = other RNA
ccccaggaaactgaaatagcagt

SEQ ID NO: 329 - RNA, 23 nt, synthetic construct
  source 1..23: mol_type = other RNA
tttccccaggaaactgaaatagc

SEQ ID NO: 330 - RNA, 23 nt, synthetic construct
  source 1..23: mol_type = other RNA
ctgttaaagaggaagttagaaga

SEQ ID NO: 331 - RNA, 23 nt, synthetic construct
  source 1..23: mol_type = other RNA
ttcttacaggcaacaatgcagga

SEQ ID NO: 332 - RNA, 23 nt, synthetic construct
  source 1..23: mol_type = other RNA
tattctagttgaaagaattcaga

SEQ ID NO: 333 - RNA, 23 nt, synthetic construct
  source 1..23: mol_type = other RNA
aatctatagcagttggccaaaga

SEQ ID NO: 334 - RNA, 23 nt, synthetic construct
  source 1..23: mol_type = other RNA
tgcagggtgagtgagcgagaggc

SEQ ID NO: 335 - RNA, 23 nt, synthetic construct
  source 1..23: mol_type = other RNA
ttgcagggtgagtgagcgagagg

SEQ ID NO: 336 - RNA, 23 nt, synthetic construct
  source 1..23: mol_type = other RNA
ctttgcagggtgagtgagcgaga

SEQ ID NO: 337 - RNA, 23 nt, synthetic construct
  source 1..23: mol_type = other RNA
gtcctgtaggacctccaaggtga

SEQ ID NO: 338 - RNA, 23 nt, synthetic construct
  source 1..23: mol_type = other RNA
atttcacaggccttcaagaggga

SEQ ID NO: 339 - RNA, 23 nt, synthetic construct
  source 1..23: mol_type = other RNA
tttagagctgcctcctgaggaga

SEQ ID NO: 340 - RNA, 23 nt, synthetic construct
  source 1..23: mol_type = other RNA
aatttagagctgcctcctgagga

SEQ ID NO: 341 - RNA, 23 nt, synthetic construct
  source 1..23: mol_type = other RNA
caatttagagctgcctcctgagg

SEQ ID NO: 342 - RNA, 23 nt, synthetic construct
  source 1..23: mol_type = other RNA
tgcacacaggcacttcgaggaga

SEQ ID NO: 343 - RNA, 23 nt, synthetic construct
  source 1..23: mol_type = other RNA
cccaggtggccgtcgaggaccga

SEQ ID NO: 344 - RNA, 23 nt, synthetic construct
  source 1..23: mol_type = other RNA
tcctcccaggtggccgtcgagga

SEQ ID NO: 345 - RNA, 23 nt, synthetic construct
  source 1..23: mol_type = other RNA
acagacctgtgaaggaaatgggc

SEQ ID NO: 346 - RNA, 23 nt, synthetic construct
  source 1..23: mol_type = other RNA
gacagacctgtgaaggaaatggg

SEQ ID NO: 347 - RNA, 23 nt, synthetic construct
  source 1..23: mol_type = other RNA
tgacagacctgtgaaggaaatgg

SEQ ID NO: 348 - RNA, 23 nt, synthetic construct
  source 1..23: mol_type = other RNA
gacacacctgttcttcagtaaga

SEQ ID NO: 349 - RNA, 23 nt, synthetic construct
  source 1..23: mol_type = other RNA
tgtaattaccattcaccatctgt

SEQ ID NO: 350 - RNA, 23 nt, synthetic construct
  source 1..23: mol_type = other RNA
cacagacctgcaattccccgagt

SEQ ID NO: 351 - RNA, 23 nt, synthetic construct
  source 1..23: mol_type = other RNA
ttcacagacctgcaattccccga

SEQ ID NO: 352 - RNA, 23 nt, synthetic construct
  source 1..23: mol_type = other RNA
atcttactctgcactgtttcagc

SEQ ID NO: 353 - RNA, 23 nt, synthetic construct
  source 1..23: mol_type = other RNA
tctatacctgttggcacatgtga

SEQ ID NO: 354 - RNA, 23 nt, synthetic construct
  source 1..23: mol_type = other RNA
tgtctatacctgttggcacatgt

SEQ ID NO: 355 - RNA, 23 nt, synthetic construct
  source 1..23: mol_type = other RNA
tttaccttcatctcttcaactgc

SEQ ID NO: 356 - RNA, 23 nt, synthetic construct
  source 1..23: mol_type = other RNA
gcaactgacttccaaagtcttgc

SEQ ID NO: 357 - RNA, 23 nt, synthetic construct
  source 1..23: mol_type = other RNA
acttacatctagcacctcagaga

SEQ ID NO: 358 - RNA, 23 nt, synthetic construct
  source 1..23: mol_type = other RNA
caacttacatctagcacctcaga

SEQ ID NO: 359 - RNA, 23 nt, synthetic construct
  source 1..23: mol_type = other RNA
tacataccacacaatgatttagc

SEQ ID NO: 360 - RNA, 23 nt, synthetic construct
  source 1..23: mol_type = other RNA
atttaccatatctttattgaagt

SEQ ID NO: 361 - RNA, 23 nt, synthetic construct
  source 1..23: mol_type = other RNA
ccaatttaccatatctttattga

SEQ ID NO: 362 - RNA, 23 nt, synthetic construct
  source 1..23: mol_type = other RNA
ctaataccttgagagcattatgt

SEQ ID NO: 363 - RNA, 23 nt, synthetic construct
  source 1..23: mol_type = other RNA
actcacaatttgtgcaaagttga

SEQ ID NO: 364 - RNA, 23 nt, synthetic construct
  source 1..23: mol_type = other RNA
acaactcacaatttgtgcaaagt

SEQ ID NO: 365 - RNA, 23 nt, synthetic construct
  source 1..23: mol_type = other RNA
tacctacccttgtcggtccttgt

SEQ ID NO: 366 - RNA, 23 nt, synthetic construct
  source 1..23: mol_type = other RNA
acttaccttaagataccatttgt

SEQ ID NO: 367 - RNA, 23 nt, synthetic construct
  source 1..23: mol_type = other RNA
aaattaccttgacttgctcaagc

SEQ ID NO: 368 - RNA, 23 nt, synthetic construct
  source 1..23: mol_type = other RNA
gtctaacctttatccactggaga

SEQ ID NO: 369 - RNA, 23 nt, synthetic construct
  source 1..23: mol_type = other RNA
atgtctaacctttatccactgga

SEQ ID NO: 370 - RNA, 23 nt, synthetic construct
  source 1..23: mol_type = other RNA
tccctaccttaacgtcaaatggt

SEQ ID NO: 371 - RNA, 23 nt, synthetic construct
  source 1..23: mol_type = other RNA
ttccctaccttaacgtcaaatgg

SEQ ID NO: 372 - RNA, 23 nt, synthetic construct
  source 1..23: mol_type = other RNA
attaccttcactggctgagtggc

SEQ ID NO: 373 - RNA, 23 nt, synthetic construct
  source 1..23: mol_type = other RNA
cattaccttcactggctgagtgg

SEQ ID NO: 374 - RNA, 23 nt, synthetic construct
  source 1..23: mol_type = other RNA
ttcattaccttcactggctgagt

SEQ ID NO: 375 - RNA, 23 nt, synthetic construct
  source 1..23: mol_type = other RNA
tacttacaggctccaatagtggt

SEQ ID NO: 376 - RNA, 23 nt, synthetic construct
  source 1..23: mol_type = other RNA
atacttacaggctccaatagtgg

SEQ ID NO: 377 - RNA, 23 nt, synthetic construct
  source 1..23: mol_type = other RNA
ttctcataccttctgcttgatga

SEQ ID NO: 378 - RNA, 23 nt, synthetic construct
  source 1..23: mol_type = other RNA
aaacttacttcgatccgtaatga

SEQ ID NO: 379 - RNA, 23 nt, synthetic construct
  source 1..23: mol_type = other RNA
gatactaaccttggtttctgtga

SEQ ID NO: 380 - RNA, 23 nt, synthetic construct
  source 1..23: mol_type = other RNA
atgtcctaccctatgtacatcgt

SEQ ID NO: 381 - RNA, 23 nt, synthetic construct
  source 1..23: mol_type = other RNA
attacctctgggctcctggtaga

SEQ ID NO: 382 - RNA, 23 nt, synthetic construct
  source 1..23: mol_type = other RNA
tcaattacctctgggctcctggt

SEQ ID NO: 383 - RNA, 23 nt, synthetic construct
  source 1..23: mol_type = other RNA
ttcaattacctctgggctcctgg

SEQ ID NO: 384 - RNA, 23 nt, synthetic construct
  source 1..23: mol_type = other RNA
cggtaccttgactttctcgaggt

SEQ ID NO: 385 - RNA, 23 nt, synthetic construct
  source 1..23: mol_type = other RNA
acggtaccttgactttctcgagg

SEQ ID NO: 386 - RNA, 23 nt, synthetic construct
  source 1..23: mol_type = other RNA
agacggtaccttgactttctcga

SEQ ID NO: 387 - RNA, 23 nt, synthetic construct
  source 1..23: mol_type = other RNA
acttactggaaagaaagtgctga

SEQ ID NO: 388 - RNA, 23 nt, synthetic construct
  source 1..23: mol_type = other RNA
atgacttactggaaagaaagtgc

SEQ ID NO: 389 - RNA, 23 nt, synthetic construct
  source 1..23: mol_type = other RNA
ctgcaggacggagaggagcagga

SEQ ID NO: 390 - RNA, 23 nt, synthetic construct
  source 1..23: mol_type = other RNA
cctgcaggacggagaggagcagg

SEQ ID NO: 391 - RNA, 23 nt, synthetic construct
  source 1..23: mol_type = other RNA
catttgcaggtggaaagcggtga

SEQ ID NO: 392 - RNA, 23 nt, synthetic construct
  source 1..23: mol_type = other RNA
cacaggcaaagaacagaaggaga

SEQ ID NO: 393 - RNA, 23 nt, synthetic construct
  source 1..23: mol_type = other RNA
tccacaggcaaagaacagaagga

SEQ ID NO: 394 - RNA, 23 nt, synthetic construct
  source 1..23: mol_type = other RNA
ctccacaggcaaagaacagaagg

SEQ ID NO: 395 - RNA, 23 nt, synthetic construct
  source 1..23: mol_type = other RNA
gtcctagggctcccggggccggc

SEQ ID NO: 396 - RNA, 23 nt, synthetic construct
  source 1..23: mol_type = other RNA
tgtcctagggctcccggggccgg

SEQ ID NO: 397 - RNA, 23 nt, synthetic construct
  source 1..23: mol_type = other RNA
tttccccaggctgagaagaaagc

SEQ ID NO: 398 - RNA, 23 nt, synthetic construct
  source 1..23: mol_type = other RNA
tccaggacggccggggctttggc

SEQ ID NO: 399 - RNA, 23 nt, synthetic construct
  source 1..23: mol_type = other RNA
ctccaggacggccggggctttgg

SEQ ID NO: 400 - RNA, 23 nt, synthetic construct
  source 1..23: mol_type = other RNA
cccccaggtgtgtgttgagaagc

SEQ ID NO: 401 - RNA, 23 nt, synthetic construct
  source 1..23: mol_type = other RNA
ctccaggtggccagcagccgcgc

SEQ ID NO: 402 - RNA, 23 nt, synthetic construct
  source 1..23: mol_type = other RNA
ccctccaggtggccagcagccgc

SEQ ID NO: 403 - RNA, 23 nt, synthetic construct
  source 1..23: mol_type = other RNA
tgcagagcggctggtgtacgagg

SEQ ID NO: 404 - RNA, 23 nt, synthetic construct
  source 1..23: mol_type = other RNA
cttgcagagcggctggtgtacga

SEQ ID NO: 405 - RNA, 23 nt, synthetic construct
  source 1..23: mol_type = other RNA
ttccagacatctgcatctcctgt

SEQ ID NO: 406 - RNA, 23 nt, synthetic construct
  source 1..23: mol_type = other RNA
tctagaactgctttctggagtgt

SEQ ID NO: 407 - RNA, 23 nt, synthetic construct
  source 1..23: mol_type = other RNA
tgtctagaactgctttctggagt

SEQ ID NO: 408 - RNA, 23 nt, synthetic construct
  source 1..23: mol_type = other RNA
gctgtctagaactgctttctgga

SEQ ID NO: 409 - RNA, 23 nt, synthetic construct
  source 1..23: mol_type = other RNA
actgcttaggaccctccaaaggt

SEQ ID NO: 410 - RNA, 23 nt, synthetic construct
  source 1..23: mol_type = other RNA
tgcagggctcctggtgctgaagg

SEQ ID NO: 411 - RNA, 23 nt, synthetic construct
  source 1..23: mol_type = other RNA
tggtgcagggctcctggtgctga

SEQ ID NO: 412 - RNA, 23 nt, synthetic construct
  source 1..23: mol_type = other RNA
cctcccagatccaggagtggggc

SEQ ID NO: 413 - RNA, 23 nt, synthetic construct
  source 1..23: mol_type = other RNA
tcctcccagatccaggagtgggg

SEQ ID NO: 414 - RNA, 23 nt, synthetic construct
  source 1..23: mol_type = other RNA
cctctcagagggcactggccggc

SEQ ID NO: 415 - RNA, 23 nt, synthetic construct
  source 1..23: mol_type = other RNA
acctctcagagggcactggccgg

SEQ ID NO: 416 - RNA, 23 nt, synthetic construct
  source 1..23: mol_type = other RNA
tttgtagtccaaccctgtgatga

SEQ ID NO: 417 - RNA, 23 nt, synthetic construct
  source 1..23: mol_type = other RNA
cctaggccgttggcatccactgt

SEQ ID NO: 418 - RNA, 23 nt, synthetic construct
  source 1..23: mol_type = other RNA
catctagttcagcaaagtgagga

SEQ ID NO: 419 - RNA, 23 nt, synthetic construct
  source 1..23: mol_type = other RNA
tcatctagttcagcaaagtgagg

SEQ ID NO: 420 - RNA, 23 nt, synthetic construct
  source 1..23: mol_type = other RNA
cccagggtatttggtttcccagt

SEQ ID NO: 421 - RNA, 23 nt, synthetic construct
  source 1..23: mol_type = other RNA
gactcacccgcttctgcaggggc

SEQ ID NO: 422 - RNA, 23 nt, synthetic construct
  source 1..23: mol_type = other RNA
ggactcacccgcttctgcagggg

SEQ ID NO: 423 - RNA, 23 nt, synthetic construct
  source 1..23: mol_type = other RNA
aggactcacccgcttctgcaggg

SEQ ID NO: 424 - RNA, 23 nt, synthetic construct
  source 1..23: mol_type = other RNA
gctcacctcgtactctggctcgt

SEQ ID NO: 425 - RNA, 23 nt, synthetic construct
  source 1..23: mol_type = other RNA
acttaccactgagaatttgccgt

SEQ ID NO: 426 - RNA, 23 nt, synthetic construct
  source 1..23: mol_type = other RNA
acaacttaccactgagaatttgc

SEQ ID NO: 427 - RNA, 23 nt, synthetic construct
  source 1..23: mol_type = other RNA
actcacctgcaggacctcgtaga

SEQ ID NO: 428 - RNA, 23 nt, synthetic construct
  source 1..23: mol_type = other RNA
gacactcacctgcaggacctcgt

SEQ ID NO: 429 - RNA, 23 nt, synthetic construct
  source 1..23: mol_type = other RNA
tttaccttctggtggctccaggc

SEQ ID NO: 430 - RNA, 23 nt, synthetic construct
  source 1..23: mol_type = other RNA
atttaccttctggtggctccagg

SEQ ID NO: 431 - RNA, 23 nt, synthetic construct
  source 1..23: mol_type = other RNA
aaacttaccctcaatgttccggc

SEQ ID NO: 432 - RNA, 23 nt, synthetic construct
  source 1..23: mol_type = other RNA
caaacttaccctcaatgttccgg

SEQ ID NO: 433 - RNA, 23 nt, synthetic construct
  source 1..23: mol_type = other RNA
gcctcacctgcagcagttgttgt

SEQ ID NO: 434 - RNA, 23 nt, synthetic construct
  source 1..23: mol_type = other RNA
actcacaaattcctggtcgtggt

SEQ ID NO: 435 - RNA, 23 nt, synthetic construct
  source 1..23: mol_type = other RNA
cactcacaaattcctggtcgtgg

SEQ ID NO: 436 - RNA, 23 nt, synthetic construct
  source 1..23: mol_type = other RNA
agcactcacaaattcctggtcgt

SEQ ID NO: 437 - RNA, 23 nt, synthetic construct
  source 1..23: mol_type = other RNA
acatacatgcttctgtgtgacgc

SEQ ID NO: 438 - RNA, 23 nt, synthetic construct
  source 1..23: mol_type = other RNA
tggacatacatgcttctgtgtga

SEQ ID NO: 439 - RNA, 23 nt, synthetic construct
  source 1..23: mol_type = other RNA
acctaccgtagaggcccttgcga

SEQ ID NO: 440 - RNA, 23 nt, synthetic construct
  source 1..23: mol_type = other RNA
gtacctaccgtagaggcccttgc

SEQ ID NO: 441 - RNA, 23 nt, synthetic construct
  source 1..23: mol_type = other RNA
ctatacctcgagaaatcgcgaga

SEQ ID NO: 442 - RNA, 23 nt, synthetic construct
  source 1..23: mol_type = other RNA
ggctatacctcgagaaatcgcga

SEQ ID NO: 443 - RNA, 23 nt, synthetic construct
  source 1..23: mol_type = other RNA
tcaccaacctgttcataccggga

SEQ ID NO: 444 - RNA, 23 nt, synthetic construct
  source 1..23: mol_type = other RNA
ttcaccaacctgttcataccggg

SEQ ID NO: 445 - RNA, 23 nt, synthetic construct
  source 1..23: mol_type = other RNA
ggagctgaccttggctatcctgc

SEQ ID NO: 446 - RNA, 23 nt, synthetic construct
  source 1..23: mol_type = other RNA
cgggtacctttccatttcagtgc

SEQ ID NO: 447 - RNA, 23 nt, synthetic construct
  source 1..23: mol_type = other RNA
cccgggtacctttccatttcagt

SEQ ID NO: 448 - RNA, 23 nt, synthetic construct
  source 1..23: mol_type = other RNA
tctccttagacgacttacagtga

SEQ ID NO: 449 - RNA, 23 nt, synthetic construct
  source 1..23: mol_type = other RNA
ttctgcagcctgagagaggccga

SEQ ID NO: 450 - RNA, 23 nt, synthetic construct
  source 1..23: mol_type = other RNA
ttcaggccacgtcattctactgc

SEQ ID NO: 451 - RNA, 23 nt, synthetic construct
  source 1..23: mol_type = other RNA
cacagagatgggcgatcacctgg

SEQ ID NO: 452 - RNA, 23 nt, synthetic construct
  source 1..23: mol_type = other RNA
ctgcagaaagcacgggaacgggg

SEQ ID NO: 453 - RNA, 23 nt, synthetic construct
  source 1..23: mol_type = other RNA
tctgcagaaagcacgggaacggg

SEQ ID NO: 454 - RNA, 23 nt, synthetic construct
  source 1..23: mol_type = other RNA
ctctgcagaaagcacgggaacgg

SEQ ID NO: 455 - RNA, 23 nt, synthetic construct
  source 1..23: mol_type = other RNA
tgcagaaagcacgggaacggggc

SEQ ID NO: 456 - RNA, 23 nt, synthetic construct
  source 1..23: mol_type = other RNA
cccaggcccaaatgcagtctgga

SEQ ID NO: 457 - RNA, 23 nt, synthetic construct
  source 1..23: mol_type = other RNA
tcccaggcccaaatgcagtctgg

SEQ ID NO: 458 - RNA, 23 nt, synthetic construct
  source 1..23: mol_type = other RNA
aaacagattcgccacttgagaga

SEQ ID NO: 459 - RNA, 23 nt, synthetic construct
  source 1..23: mol_type = other RNA
tgaaacagattcgccacttgaga

SEQ ID NO: 460 - RNA, 23 nt, synthetic construct
  source 1..23: mol_type = other RNA
gcctaggagctgaaaatcctggt

SEQ ID NO: 461 - RNA, 23 nt, synthetic construct
  source 1..23: mol_type = other RNA
cgcctaggagctgaaaatcctgg

SEQ ID NO: 462 - RNA, 23 nt, synthetic construct
  source 1..23: mol_type = other RNA
cacttaccatgattgatcttagt

SEQ ID NO: 463 - RNA, 23 nt, synthetic construct
  source 1..23: mol_type = other RNA
cctgcttacctttgcccctttgt

SEQ ID NO: 464 - RNA, 23 nt, synthetic construct
  source 1..23: mol_type = other RNA
ggcttctacctgcttggcgttgc

SEQ ID NO: 465 - RNA, 23 nt, synthetic construct
  source 1..23: mol_type = other RNA
gtgactcaccttcccttgtttga

SEQ ID NO: 466 - RNA, 23 nt, synthetic construct
  source 1..23: mol_type = other RNA
ctcacctttgttccaggggttga

SEQ ID NO: 467 - RNA, 23 nt, synthetic construct
  source 1..23: mol_type = other RNA
cacctcacctttgttccaggggt

SEQ ID NO: 468 - RNA, 23 nt, synthetic construct
  source 1..23: mol_type = other RNA
gcacctcacctttgttccagggg

SEQ ID NO: 469 - RNA, 23 nt, synthetic construct
  source 1..23: mol_type = other RNA
ctttcttacctgcacgatgtagt

SEQ ID NO: 470 - RNA, 23 nt, synthetic construct
  source 1..23: mol_type = other RNA
gaactcaccgtctgcagcacagc

SEQ ID NO: 471 - RNA, 23 nt, synthetic construct
  source 1..23: mol_type = other RNA
ctcacagtttaggaagtaggggg

SEQ ID NO: 472 - RNA, 23 nt, synthetic construct
  source 1..23: mol_type = other RNA
actcacagtttaggaagtagggg

SEQ ID NO: 473 - RNA, 23 nt, synthetic construct
  source 1..23: mol_type = other RNA
cactcacagtttaggaagtaggg

SEQ ID NO: 474 - RNA, 23 nt, synthetic construct
  source 1..23: mol_type = other RNA
acactcacagtttaggaagtagg

SEQ ID NO: 475 - RNA, 23 nt, synthetic construct
  source 1..23: mol_type = other RNA
aggtctcaccattcggaggcgga

SEQ ID NO: 476 - RNA, 23 nt, synthetic construct
  source 1..23: mol_type = other RNA
ggttctaaccgctgtgatgatgt

SEQ ID NO: 477 - RNA, 23 nt, synthetic construct
  source 1..23: mol_type = other RNA
cctcacctccagggcatcaatgt

SEQ ID NO: 478 - RNA, 23 nt, synthetic construct
  source 1..23: mol_type = other RNA
gcagtacctggtggttgtggcgc

SEQ ID NO: 479 - RNA, 23 nt, synthetic construct
  source 1..23: mol_type = other RNA
aagcagtacctggtggttgtggc

SEQ ID NO: 480 - RNA, 23 nt, synthetic construct
  source 1..23: mol_type = other RNA
aaataggtttggttgcttcttga

SEQ ID NO: 481 - RNA, 23 nt, synthetic construct
  source 1..23: mol_type = other RNA
cctaggcttcccctgcaggatgt

SEQ ID NO: 482 - RNA, 23 nt, synthetic construct
  source 1..23: mol_type = other RNA
tctcctaggcttcccctgcagga

SEQ ID NO: 483 - RNA, 23 nt, synthetic construct
  source 1..23: mol_type = other RNA
ctctcctaggcttcccctgcagg

SEQ ID NO: 484 - RNA, 23 nt, synthetic construct
  source 1..23: mol_type = other RNA
tgactcagggagattcaggtggt

SEQ ID NO: 485 - RNA, 23 nt, synthetic construct
  source 1..23: mol_type = other RNA
gtgactcagggagattcaggtgg

SEQ ID NO: 486 - RNA, 23 nt, synthetic construct
  source 1..23: mol_type = other RNA
cacttaccacaggaaactgtagc

SEQ ID NO: 487 - RNA, 23 nt, synthetic construct
  source 1..23: mol_type = other RNA
acaacttaccacttatttgatga

SEQ ID NO: 488 - RNA, 23 nt, synthetic construct
  source 1..23: mol_type = other RNA
ctcaccggtactctgccttgtga

SEQ ID NO: 489 - RNA, 23 nt, synthetic construct
  source 1..23: mol_type = other RNA
tactcaccggtactctgccttgt

SEQ ID NO: 490 - RNA, 23 nt, synthetic construct
  source 1..23: mol_type = other RNA
caattaccaatttctgaaagggc

SEQ ID NO: 491 - RNA, 23 nt, synthetic construct
  source 1..23: mol_type = other RNA
acaattaccaatttctgaaaggg

SEQ ID NO: 492 - RNA, 23 nt, synthetic construct
  source 1..23: mol_type = other RNA
tacaattaccaatttctgaaagg

SEQ ID NO: 493 - RNA, 23 nt, synthetic construct
  source 1..23: mol_type = other RNA
attaccaggtaaagttcttttgc

SEQ ID NO: 494 - RNA, 23 nt, synthetic construct
  source 1..23: mol_type = other RNA
cctttacttctcttccttacagt

SEQ ID NO: 495 - RNA, 23 nt, synthetic construct
  source 1..23: mol_type = other RNA
ctcaccagagttgtccccagtgt

SEQ ID NO: 496 - RNA, 23 nt, synthetic construct
  source 1..23: mol_type = other RNA
tactcaccagagttgtccccagt

SEQ ID NO: 497 - RNA, 23 nt, synthetic construct
  source 1..23: mol_type = other RNA
acttacccatcaaagcagtgggc

SEQ ID NO: 498 - RNA, 23 nt, synthetic construct
  source 1..23: mol_type = other RNA
cacttacccatcaaagcagtggg

SEQ ID NO: 499 - RNA, 23 nt, synthetic construct
  source 1..23: mol_type = other RNA
acacttacccatcaaagcagtgg

SEQ ID NO: 500 - RNA, 23 nt, synthetic construct
  source 1..23: mol_type = other RNA
acataccagtgtaattcaaagga

SEQ ID NO: 501 - RNA, 23 nt, synthetic construct
  source 1..23: mol_type = other RNA
tacataccagtgtaattcaaagg

SEQ ID NO: 502 - RNA, 23 nt, synthetic construct
  source 1..23: mol_type = other RNA
cttacctttctccttcgagaagc

SEQ ID NO: 503 - RNA, 23 nt, synthetic construct
  source 1..23: mol_type = other RNA
atgcttacctttctccttcgaga

SEQ ID NO: 504 - RNA, 23 nt, synthetic construct
  source 1..23: mol_type = other RNA
gggccaggatccgtggaggttgc

SEQ ID NO: 505 - RNA, 23 nt, synthetic construct
  source 1..23: mol_type = other RNA
gaaagacggaggcagcctggtgg

SEQ ID NO: 506 - RNA, 23 nt, synthetic construct
  source 1..23: mol_type = other RNA
tggaaagacggaggcagcctggt

SEQ ID NO: 507 - RNA, 23 nt, synthetic construct
  source 1..23: mol_type = other RNA
ttggaaagacggaggcagcctgg

SEQ ID NO: 508 - RNA, 23 nt, synthetic construct
  source 1..23: mol_type = other RNA
agcaggccagcaagtgtgacagt

SEQ ID NO: 509 - RNA, 23 nt, synthetic construct
  source 1..23: mol_type = other RNA
gtcgagcaggccagcaagtgtga

SEQ ID NO: 510 - RNA, 23 nt, synthetic construct
  source 1..23: mol_type = other RNA
cccaggcctggagtttattcgga

SEQ ID NO: 511 - RNA, 23 nt, synthetic construct
  source 1..23: mol_type = other RNA
tcccaggcctggagtttattcgg

SEQ ID NO: 512 - RNA, 23 nt, synthetic construct
  source 1..23: mol_type = other RNA
ttccaggtcatcacagttggggc

SEQ ID NO: 513 - RNA, 23 nt, synthetic construct
  source 1..23: mol_type = other RNA
tttccaggtcatcacagttgggg

SEQ ID NO: 514 - RNA, 23 nt, synthetic construct
  source 1..23: mol_type = other RNA
ctttccaggtcatcacagttggg

SEQ ID NO: 515 - RNA, 23 nt, synthetic construct
  source 1..23: mol_type = other RNA
cctttccaggtcatcacagttgg

SEQ ID NO: 516 - RNA, 23 nt, synthetic construct
  source 1..23: mol_type = other RNA
accaggcattgcagccatgatgc

SEQ ID NO: 517 - RNA, 23 nt, synthetic construct
  source 1..23: mol_type = other RNA
tgcaccaggcattgcagccatga

SEQ ID NO: 518 - RNA, 23 nt, synthetic construct
  source 1..23: mol_type = other RNA
ttgcaggttggcagctgttttgc

SEQ ID NO: 519 - RNA, 23 nt, synthetic construct
  source 1..23: mol_type = other RNA
ctctaaggcccaagggggcaagc

SEQ ID NO: 520 - RNA, 23 nt, synthetic construct
  source 1..23: mol_type = other RNA
cccaggctgcagctcccactggg

SEQ ID NO: 521 - RNA, 23 nt, synthetic construct
  source 1..23: mol_type = other RNA
ccccaggctgcagctcccactgg

SEQ ID NO: 522 - RNA, 23 nt, synthetic construct
  source 1..23: mol_type = other RNA
tggcaggtgaccgtggcctgcga

SEQ ID NO: 523 - RNA, 23 nt, synthetic construct
  source 1..23: mol_type = other RNA
tctggcaggtgaccgtggcctgc

SEQ ID NO: 524 - RNA, 23 nt, synthetic construct
  source 1..23: mol_type = other RNA
ccgcaccttggcgcagcggtgga

SEQ ID NO: 525 - RNA, 23 nt, synthetic construct
  source 1..23: mol_type = other RNA
cccgcaccttggcgcagcggtgg

SEQ ID NO: 526 - RNA, 23 nt, synthetic construct
  source 1..23: mol_type = other RNA
cacccgcaccttggcgcagcggt

SEQ ID NO: 527 - RNA, 23 nt, synthetic construct
  source 1..23: mol_type = other RNA
gctcaccagctccagcaggtcgc

SEQ ID NO: 528 - RNA, 23 nt, synthetic construct
  source 1..23: mol_type = other RNA
gtggctcaccagctccagcaggt

SEQ ID NO: 529 - RNA, 23 nt, synthetic construct
  source 1..23: mol_type = other RNA
cttacctgtctgtggaagcgggt

SEQ ID NO: 530 - RNA, 23 nt, synthetic construct
  source 1..23: mol_type = other RNA
gcttacctgtctgtggaagcggg

SEQ ID NO: 531 - RNA, 23 nt, synthetic construct
  source 1..23: mol_type = other RNA
tgcttacctgtctgtggaagcgg

SEQ ID NO: 532 - RNA, 23 nt, synthetic construct
  source 1..23: mol_type = other RNA
cgtgcttacctgtctgtggaagc

SEQ ID NO: 533 - RNA, 23 nt, synthetic construct
  source 1..23: mol_type = other RNA
tcacttacctatgagggtgccgc

SEQ ID NO: 534 - RNA, 23 nt, synthetic construct
  source 1..23: mol_type = other RNA
gcacctacctcgggagctgaggc

SEQ ID NO: 535 - RNA, 23 nt, synthetic construct
  source 1..23: mol_type = other RNA
agcacctacctcgggagctgagg

SEQ ID NO: 536 - RNA, 23 nt, synthetic construct
  source 1..23: mol_type = other RNA
gacttaccagccacgtgggcagc

SEQ ID NO: 537 - RNA, 23 nt, synthetic construct
  source 1..23: mol_type = other RNA
cttacctgccccatgggtgctgg

SEQ ID NO: 538 - RNA, 23 nt, synthetic construct
  source 1..23: mol_type = other RNA
ctgcttacctgccccatgggtgc

SEQ ID NO: 539 - RNA, 23 nt, synthetic construct
  source 1..23: mol_type = other RNA
tacagtcacctccatgcgctcgc

SEQ ID NO: 540 - RNA, 23 nt, synthetic construct
  source 1..23: mol_type = other RNA
cctcctacctgtgaggacgtggc

SEQ ID NO: 541 - RNA, 23 nt, synthetic construct
  source 1..23: mol_type = other RNA
gcctcctacctgtgaggacgtgg

SEQ ID NO: 542 - RNA, 23 nt, synthetic construct
  source 1..23: mol_type = other RNA
ttcacctgctcctgaggggccgg

SEQ ID NO: 543 - RNA, 23 nt, synthetic construct
  source 1..23: mol_type = other RNA
ctcttcacctgctcctgaggggc

SEQ ID NO: 544 - RNA, 23 nt, synthetic construct
  source 1..23: mol_type = other RNA
cctcttcacctgctcctgagggg

SEQ ID NO: 545 - RNA, 23 nt, synthetic construct
  source 1..23: mol_type = other RNA
tctctcagactccccagacaggc

SEQ ID NO: 546 - RNA, 23 nt, synthetic construct
  source 1..23: mol_type = other RNA
atctctcagactccccagacagg

SEQ ID NO: 547 - RNA, 23 nt, synthetic construct
  source 1..23: mol_type = other RNA
tccagagagaagggcagaagtgc

SEQ ID NO: 548 - RNA, 23 nt, synthetic construct
  source 1..23: mol_type = other RNA
cttccagagagaagggcagaagt

SEQ ID NO: 549 - RNA, 23 nt, synthetic construct
  source 1..23: mol_type = other RNA
tgcagggacaataggagccaggc

SEQ ID NO: 550 - RNA, 23 nt, synthetic construct
  source 1..23: mol_type = other RNA
ctgcagggacaataggagccagg

SEQ ID NO: 551 - RNA, 23 nt, synthetic construct
  source 1..23: mol_type = other RNA
tcaaagaaggaggacccctcagc

SEQ ID NO: 552 - RNA, 23 nt, synthetic construct
  source 1..23: mol_type = other RNA
acctacctaagaaccatcctggc

SEQ ID NO: 553 - RNA, 23 nt, synthetic construct
  source 1..23: mol_type = other RNA
cacctacctaagaaccatcctgg

SEQ ID NO: 554 - RNA, 23 nt, synthetic construct
  source 1..23: mol_type = other RNA
aggccgcacctgtcaccctgagc

SEQ ID NO: 555 - RNA, 23 nt, synthetic construct
  source 1..23: mol_type = other RNA
gttacctcgtgcggcccgggagc

SEQ ID NO: 556 - RNA, 23 nt, synthetic construct
  source 1..23: mol_type = other RNA
acgttacctcgtgcggcccggga

SEQ ID NO: 557 - RNA, 23 nt, synthetic construct
  source 1..23: mol_type = other RNA
gacgttacctcgtgcggcccggg

SEQ ID NO: 558 - RNA, 23 nt, synthetic construct
  source 1..23: mol_type = other RNA
tgacgttacctcgtgcggcccgg

SEQ ID NO: 559 - RNA, 23 nt, synthetic construct
  source 1..23: mol_type = other RNA
actcaccaggggctggccggtgc

SEQ ID NO: 560 - RNA, 23 nt, synthetic construct
  source 1..23: mol_type = other RNA
agactcaccaggggctggccggt

SEQ ID NO: 561 - RNA, 23 nt, synthetic construct
  source 1..23: mol_type = other RNA
gagactcaccaggggctggccgg

SEQ ID NO: 562 - RNA, 23 nt, synthetic construct
  source 1..23: mol_type = other RNA
tcttccaggctgcccccaagtgt

SEQ ID NO: 563 - RNA, 23 nt, synthetic construct
  source 1..23: mol_type = other RNA
tttaggttattggagtgatgagt

SEQ ID NO: 564 - RNA, 23 nt, synthetic construct
  source 1..23: mol_type = other RNA
tgtttaggttattggagtgatga

SEQ ID NO: 565 - RNA, 23 nt, synthetic construct
  source 1..23: mol_type = other RNA
ggacagatctattccagagggga

SEQ ID NO: 566 - RNA, 23 nt, synthetic construct
  source 1..23: mol_type = other RNA
tggacagatctattccagagggg

SEQ ID NO: 567 - RNA, 23 nt, synthetic construct
  source 1..23: mol_type = other RNA
ttggacagatctattccagaggg

SEQ ID NO: 568 - RNA, 23 nt, synthetic construct
  source 1..23: mol_type = other RNA
tttggacagatctattccagagg

SEQ ID NO: 569 - RNA, 23 nt, synthetic construct
  source 1..23: mol_type = other RNA
tttcagcacaaacacagagcagt

SEQ ID NO: 570 - RNA, 23 nt, synthetic construct
  source 1..23: mol_type = other RNA
ttatttcagcacaaacacagagc

SEQ ID NO: 571 - RNA, 23 nt, synthetic construct
  source 1..23: mol_type = other RNA
ttcccaggtccacctgagagtgc

SEQ ID NO: 572 - RNA, 23 nt, synthetic construct
  source 1..23: mol_type = other RNA
tcttcccaggtccacctgagagt

SEQ ID NO: 573 - RNA, 23 nt, synthetic construct
  source 1..23: mol_type = other RNA
cactgtaggtctgccacaagaga

SEQ ID NO: 574 - RNA, 23 nt, synthetic construct
  source 1..23: mol_type = other RNA
cttacctcttcactgttggtggc

SEQ ID NO: 575 - RNA, 23 nt, synthetic construct
  source 1..23: mol_type = other RNA
gcttacctcttcactgttggtgg

SEQ ID NO: 576 - RNA, 23 nt, synthetic construct
  source 1..23: mol_type = other RNA
aggcttacctcttcactgttggt

SEQ ID NO: 577 - RNA, 23 nt, synthetic construct
  source 1..23: mol_type = other RNA
gaggcttacctcttcactgttgg

SEQ ID NO: 578 - RNA, 23 nt, synthetic construct
  source 1..23: mol_type = other RNA
cacttactgagattcatcattgt

SEQ ID NO: 579 - RNA, 23 nt, synthetic construct
  source 1..23: mol_type = other RNA
ggcctaccttcagattggagagc

SEQ ID NO: 580 - RNA, 23 nt, synthetic construct
  source 1..23: mol_type = other RNA
aaggcctaccttcagattggaga

SEQ ID NO: 581 - RNA, 23 nt, synthetic construct
  source 1..23: mol_type = other RNA
tgcgcacctggcattcatgtggc

SEQ ID NO: 582 - RNA, 23 nt, synthetic construct
  source 1..23: mol_type = other RNA
ctgcgcacctggcattcatgtgg

SEQ ID NO: 583 - RNA, 23 nt, synthetic construct
  source 1..23: mol_type = other RNA
tttacagatgtggaaatggaggc

SEQ ID NO: 584 - RNA, 23 nt, synthetic construct
  source 1..23: mol_type = other RNA
ctcctcagttaataacgacatga

SEQ ID NO: 585 - RNA, 23 nt, synthetic construct
  source 1..23: mol_type = other RNA
ctctaggagaaagaatgacgaga

SEQ ID NO: 586 - RNA, 23 nt, synthetic construct
  source 1..23: mol_type = other RNA
cactctaggagaaagaatgacga

SEQ ID NO: 587 - RNA, 23 nt, synthetic construct
  source 1..23: mol_type = other RNA
tgacaggtagatgtaaaatcaga

SEQ ID NO: 588 - RNA, 23 nt, synthetic construct
  source 1..23: mol_type = other RNA
ccccatcagaatataacaccagc

SEQ ID NO: 589 - RNA, 23 nt, synthetic construct
  source 1..23: mol_type = other RNA
tgctataggtgggaactgcaaga

SEQ ID NO: 590 - RNA, 23 nt, synthetic construct
  source 1..23: mol_type = other RNA
cacagaagtaaaagattatgagc

SEQ ID NO: 591 - RNA, 23 nt, synthetic construct
  source 1..23: mol_type = other RNA
ttcacagaagtaaaagattatga

SEQ ID NO: 592 - RNA, 23 nt, synthetic construct
  source 1..23: mol_type = other RNA
tacagggcatccagatggtgtgt

SEQ ID NO: 593 - RNA, 23 nt, synthetic construct
  source 1..23: mol_type = other RNA
gctacagggcatccagatggtgt

SEQ ID NO: 594 - RNA, 23 nt, synthetic construct
  source 1..23: mol_type = other RNA
ccgctacagggcatccagatggt

SEQ ID NO: 595 - RNA, 23 nt, synthetic construct
  source 1..23: mol_type = other RNA
actcacccgacttctgaacgtgc

SEQ ID NO: 596 - RNA, 23 nt, synthetic construct
  source 1..23: mol_type = other RNA
ccactcacccgacttctgaacgt

SEQ ID NO: 597 - RNA, 23 nt, synthetic construct
  source 1..23: mol_type = other RNA
tttactatgtctcagtggatggg

SEQ ID NO: 598 - RNA, 23 nt, synthetic construct
  source 1..23: mol_type = other RNA
ctttactatgtctcagtggatgg

SEQ ID NO: 599 - RNA, 23 nt, synthetic construct
  source 1..23: mol_type = other RNA
atactttactatgtctcagtgga

SEQ ID NO: 600 - RNA, 23 nt, synthetic construct
  source 1..23: mol_type = other RNA
tgcttaccatacagccacacaga

SEQ ID NO: 601 - RNA, 23 nt, synthetic construct
  source 1..23: mol_type = other RNA
ctcaccttctgagaagatgatgt

SEQ ID NO: 602 - RNA, 23 nt, synthetic construct
  source 1..23: mol_type = other RNA
aaactcaccttctgagaagatga

SEQ ID NO: 603 - RNA, 23 nt, synthetic construct
  source 1..23: mol_type = other RNA
aactcacctctaaaccctggggt

SEQ ID NO: 604 - RNA, 23 nt, synthetic construct
  source 1..23: mol_type = other RNA
taactcacctctaaaccctgggg

SEQ ID NO: 605 - RNA, 23 nt, synthetic construct
  source 1..23: mol_type = other RNA
ttaactcacctctaaaccctggg

SEQ ID NO: 606 - RNA, 23 nt, synthetic construct
  source 1..23: mol_type = other RNA
taacttacctgcccactgttagc

SEQ ID NO: 607 - RNA, 23 nt, synthetic construct
  source 1..23: mol_type = other RNA
cctacctcccactgcattacagc

SEQ ID NO: 608 - RNA, 23 nt, synthetic construct
  source 1..23: mol_type = other RNA
ccttacctggtggttgagccaga

SEQ ID NO: 609 - RNA, 23 nt, synthetic construct
  source 1..23: mol_type = other RNA
cttacctgggctggggaagaagg

SEQ ID NO: 610 - RNA, 23 nt, synthetic construct
  source 1..23: mol_type = other RNA
gcccttacctgggctggggaaga

SEQ ID NO: 611 - RNA, 23 nt, synthetic construct
  source 1..23: mol_type = other RNA
tataggaaaaccagtgagtctgg

SEQ ID NO: 612 - RNA, 23 nt, synthetic construct
  source 1..23: mol_type = other RNA
accttataggaaaaccagtgagt

SEQ ID NO: 613 - RNA, 23 nt, synthetic construct
  source 1..23: mol_type = other RNA
ctctcataggtggtattcacagc

SEQ ID NO: 614 - RNA, 23 nt, synthetic construct
  source 1..23: mol_type = other RNA
ctcaccgtagggccagcctcaga

SEQ ID NO: 615 - RNA, 23 nt, synthetic construct
  source 1..23: mol_type = other RNA
caacttacccagaggcaaatggc

SEQ ID NO: 616 - RNA, 23 nt, synthetic construct
  source 1..23: mol_type = other RNA
gcaacttacccagaggcaaatgg

SEQ ID NO: 617 - RNA, 23 nt, synthetic construct
  source 1..23: mol_type = other RNA
actcacctctgcatgctcatgga

SEQ ID NO: 618 - RNA, 23 nt, synthetic construct
  source 1..23: mol_type = other RNA
tactcacctctgcatgctcatgg

SEQ ID NO: 619 - RNA, 23 nt, synthetic construct
  source 1..23: mol_type = other RNA
tgtcctcagtggtcccaggctgc

SEQ ID NO: 620 - RNA, 23 nt, synthetic construct
  source 1..23: mol_type = other RNA
catgcagtggtgaagttcatgga

SEQ ID NO: 621 - RNA, 23 nt, synthetic construct
  source 1..23: mol_type = other RNA
tcatgcagtggtgaagttcatgg

SEQ ID NO: 622 - RNA, 23 nt, synthetic construct
  source 1..23: mol_type = other RNA
tgcagaccaaagaaagatagagc

SEQ ID NO: 623 - RNA, 23 nt, synthetic construct
  source 1..23: mol_type = other RNA
attgcagaccaaagaaagataga

SEQ ID NO: 624 - RNA, 23 nt, synthetic construct
  source 1..23: mol_type = other RNA
tttccagaaaatcagttcgagga

SEQ ID NO: 625 - RNA, 23 nt, synthetic construct
  source 1..23: mol_type = other RNA
tttgcagtccctgtgggccttgc

SEQ ID NO: 626 - RNA, 23 nt, synthetic construct
  source 1..23: mol_type = other RNA
cctcagatgtgacaagccgaggc

SEQ ID NO: 627 - RNA, 23 nt, synthetic construct
  source 1..23: mol_type = other RNA
ccctcagatgtgacaagccgagg

SEQ ID NO: 628 - RNA, 23 nt, synthetic construct
  source 1..23: mol_type = other RNA
ttccctcagatgtgacaagccga

SEQ ID NO: 629 - RNA, 23 nt, synthetic construct
  source 1..23: mol_type = other RNA
gcttaccttggcatggtggaggt

SEQ ID NO: 630 - RNA, 23 nt, synthetic construct
  source 1..23: mol_type = other RNA
cgcttaccttggcatggtggagg

SEQ ID NO: 631 - RNA, 23 nt, synthetic construct
  source 1..23: mol_type = other RNA
accgcttaccttggcatggtgga

SEQ ID NO: 632 - RNA, 23 nt, synthetic construct
  source 1..23: mol_type = other RNA
actcaccttcgtgatgattctgc

SEQ ID NO: 633 - RNA, 23 nt, synthetic construct
  source 1..23: mol_type = other RNA
cccacctgcatggtgatgttgga

SEQ ID NO: 634 - RNA, 23 nt, synthetic construct
  source 1..23: mol_type = other RNA
gcccacctgcatggtgatgttgg

SEQ ID NO: 635 - RNA, 23 nt, synthetic construct
  source 1..23: mol_type = other RNA
gatgcccacctgcatggtgatgt

SEQ ID NO: 636 - RNA, 23 nt, synthetic construct
  source 1..23: mol_type = other RNA
tcctcacctgcattcacatttgt

SEQ ID NO: 637 - RNA, 23 nt, synthetic construct
  source 1..23: mol_type = other RNA
gttgtactgggggccagggaggc

SEQ ID NO: 638 - RNA, 23 nt, synthetic construct
  source 1..23: mol_type = other RNA
ggttgtactgggggccagggagg

SEQ ID NO: 639 - RNA, 23 nt, synthetic construct
  source 1..23: mol_type = other RNA
aaccaacctgcaagtacgttcgt

SEQ ID NO: 640 - RNA, 23 nt, synthetic construct
  source 1..23: mol_type = other RNA
ttccctgaaatccagacaggaga

SEQ ID NO: 641 - RNA, 23 nt, synthetic construct
  source 1..23: mol_type = other RNA
tcttccctgaaatccagacagga

SEQ ID NO: 642 - RNA, 23 nt, synthetic construct
  source 1..23: mol_type = other RNA
atcttccctgaaatccagacagg

SEQ ID NO: 643 - RNA, 23 nt, synthetic construct
  source 1..23: mol_type = other RNA
gtcctggggagatgatgcacagt

SEQ ID NO: 644 - RNA, 23 nt, synthetic construct
  source 1..23: mol_type = other RNA
ttaccttggaagtggacgtaggt

SEQ ID NO: 645 - RNA, 23 nt, synthetic construct
  source 1..23: mol_type = other RNA
cttaccttggaagtggacgtagg

SEQ ID NO: 646 - RNA, 23 nt, synthetic construct
  source 1..23: mol_type = other RNA
tgccttaccttggaagtggacgt

SEQ ID NO: 647 - RNA, 23 nt, synthetic construct
  source 1..23: mol_type = other RNA
atacctcccccaccctgatgcgg

SEQ ID NO: 648 - RNA, 23 nt, synthetic construct
  source 1..23: mol_type = other RNA
acatacctcccccaccctgatgc

SEQ ID NO: 649 - RNA, 23 nt, synthetic construct
  source 1..23: mol_type = other RNA
aagtctggatatagagagtaggt

SEQ ID NO: 650 - RNA, 23 nt, synthetic construct
  source 1..23: mol_type = other RNA
aaagtctggatatagagagtagg

SEQ ID NO: 651 - RNA, 23 nt, synthetic construct
  source 1..23: mol_type = other RNA
aatgcctagaatcaataaaatgt

SEQ ID NO: 652 - RNA, 23 nt, synthetic construct
  source 1..23: mol_type = other RNA
gactacctgaatataatgaatga

SEQ ID NO: 653 - RNA, 23 nt, synthetic construct
  source 1..23: mol_type = other RNA
cctcctaaaggagatagatatgc

SEQ ID NO: 654 - RNA, 23 nt, synthetic construct
  source 1..23: mol_type = other RNA
tttacctgatataacatcacagt

SEQ ID NO: 655 - RNA, 23 nt, synthetic construct
  source 1..23: mol_type = other RNA
agatacctgaataaccctctgga

SEQ ID NO: 656 - RNA, 23 nt, synthetic construct
  source 1..23: mol_type = other RNA
aagatacctgaataaccctctgg

SEQ ID NO: 657 - RNA, 23 nt, synthetic construct
  source 1..23: mol_type = other RNA
agctcctgaggaaagagcagggc

SEQ ID NO: 658 - RNA, 23 nt, synthetic construct
  source 1..23: mol_type = other RNA
aagctcctgaggaaagagcaggg

SEQ ID NO: 659 - RNA, 23 nt, synthetic construct
  source 1..23: mol_type = other RNA
gaagctcctgaggaaagagcagg

SEQ ID NO: 660 - RNA, 23 nt, synthetic construct
  source 1..23: mol_type = other RNA
cccctaaatcagtcaggggaagc

SEQ ID NO: 661 - RNA, 23 nt, synthetic construct
  source 1..23: mol_type = other RNA
cagcccctaaatcagtcagggga

SEQ ID NO: 662 - RNA, 23 nt, synthetic construct
  source 1..23: mol_type = other RNA
ccagcccctaaatcagtcagggg

SEQ ID NO: 663 - RNA, 23 nt, synthetic construct
  source 1..23: mol_type = other RNA
ttacgggcagaggccaggagcgc

SEQ ID NO: 664 - RNA, 23 nt, synthetic construct
  source 1..23: mol_type = other RNA
gcttacgggcagaggccaggagc

SEQ ID NO: 665 - RNA, 23 nt, synthetic construct
  source 1..23: mol_type = other RNA
gtgcttacgggcagaggccagga

SEQ ID NO: 666 - RNA, 23 nt, synthetic construct
  source 1..23: mol_type = other RNA
ggagtacctgaggaatatcggga

SEQ ID NO: 667 - RNA, 23 nt, synthetic construct
  source 1..23: mol_type = other RNA
ctcacgctggatagcctccaggc

SEQ ID NO: 668 - RNA, 23 nt, synthetic construct
  source 1..23: mol_type = other RNA
actcacgctggatagcctccagg

SEQ ID NO: 669 - RNA, 23 nt, synthetic construct
  source 1..23: mol_type = other RNA
ttaccccacttaactatcttggg

SEQ ID NO: 670 - RNA, 23 nt, synthetic construct
  source 1..23: mol_type = other RNA
cttaccccacttaactatcttgg

SEQ ID NO: 671 - RNA, 23 nt, synthetic construct
  source 1..23: mol_type = other RNA
ttcctgtgtgagcagaaaagagg

SEQ ID NO: 672 - RNA, 23 nt, synthetic construct
  source 1..23: mol_type = other RNA
gcttcctgtgtgagcagaaaaga

SEQ ID NO: 673 - RNA, 23 nt, synthetic construct
  source 1..23: mol_type = other RNA
ggcccctgtggggaaacgagggt

SEQ ID NO: 674 - RNA, 23 nt, synthetic construct
  source 1..23: mol_type = other RNA
gggcccctgtggggaaacgaggg

SEQ ID NO: 675 - RNA, 23 nt, synthetic construct
  source 1..23: mol_type = other RNA
agggcccctgtggggaaacgagg

SEQ ID NO: 676 - RNA, 23 nt, synthetic construct
  source 1..23: mol_type = other RNA
agtctagtgaggagaaagagggg

SEQ ID NO: 677 - RNA, 23 nt, synthetic construct
  source 1..23: mol_type = other RNA
aagtctagtgaggagaaagaggg

SEQ ID NO: 678 - RNA, 23 nt, synthetic construct
  source 1..23: mol_type = other RNA
caagtctagtgaggagaaagagg

SEQ ID NO: 679 - RNA, 23 nt, synthetic construct
  source 1..23: mol_type = other RNA
gtcaagtctagtgaggagaaaga

SEQ ID NO: 680 - RNA, 23 nt, synthetic construct
  source 1..23: mol_type = other RNA
acatctaggagaggaagagagga

SEQ ID NO: 681 - RNA, 23 nt, synthetic construct
  source 1..23: mol_type = other RNA
aacatctaggagaggaagagagg

SEQ ID NO: 682 - RNA, 23 nt, synthetic construct
  source 1..23: mol_type = other RNA
ggaacatctaggagaggaagaga

SEQ ID NO: 683 - RNA, 23 nt, synthetic construct
  source 1..23: mol_type = other RNA
tgtttccctgcagacaaaaaaga

SEQ ID NO: 684 - RNA, 23 nt, synthetic construct
  source 1..23: mol_type = other RNA
cactctgatgggagacaccaggg

SEQ ID NO: 685 - RNA, 23 nt, synthetic construct
  source 1..23: mol_type = other RNA
tcactctgatgggagacaccagg

SEQ ID NO: 686 - RNA, 23 nt, synthetic construct
  source 1..23: mol_type = other RNA
tttcttatggagaggaaagaagg

SEQ ID NO: 687 - RNA, 23 nt, synthetic construct
  source 1..23: mol_type = other RNA
gtgtttcttatggagaggaaaga

SEQ ID NO: 688 - RNA, 23 nt, synthetic construct
  source 1..23: mol_type = other RNA
agtaccttcagggccatctgaga

SEQ ID NO: 689 - RNA, 23 nt, synthetic construct
  source 1..23: mol_type = other RNA
tcagtaccttcagggccatctga

SEQ ID NO: 690 - RNA, 23 nt, synthetic construct
  source 1..23: mol_type = other RNA
actcacctgcccacagcaggggc

SEQ ID NO: 691 - RNA, 23 nt, synthetic construct
  source 1..23: mol_type = other RNA
cactcacctgcccacagcagggg

SEQ ID NO: 692 - RNA, 23 nt, synthetic construct
  source 1..23: mol_type = other RNA
ccactcacctgcccacagcaggg

SEQ ID NO: 693 - RNA, 23 nt, synthetic construct
  source 1..23: mol_type = other RNA
ctcacctgtcacatgcacagaga

SEQ ID NO: 694 - RNA, 23 nt, synthetic construct
  source 1..23: mol_type = other RNA
gcctcacctgtcacatgcacaga

SEQ ID NO: 695 - RNA, 23 nt, synthetic construct
  source 1..23: mol_type = other RNA
cttacaggtgacgttgagctgga

SEQ ID NO: 696 - RNA, 23 nt, synthetic construct
  source 1..23: mol_type = other RNA
acttacaggtgacgttgagctgg

SEQ ID NO: 697 - RNA, 23 nt, synthetic construct
  source 1..23: mol_type = other RNA
tcctacctgagccatctcctgga

SEQ ID NO: 698 - RNA, 23 nt, synthetic construct
  source 1..23: mol_type = other RNA
ttcctacctgagccatctcctgg

SEQ ID NO: 699 - RNA, 23 nt, synthetic construct
  source 1..23: mol_type = other RNA
tcacatgaagaagatgaggcaga

SEQ ID NO: 700 - RNA, 23 nt, synthetic construct
  source 1..23: mol_type = other RNA
tgctcacatgaagaagatgaggc

SEQ ID NO: 701 - RNA, 23 nt, synthetic construct
  source 1..23: mol_type = other RNA
atgctcacatgaagaagatgagg

SEQ ID NO: 702 - RNA, 23 nt, synthetic construct
  source 1..23: mol_type = other RNA
ctcaccggggaggctgaccctgt

SEQ ID NO: 703 - RNA, 23 nt, synthetic construct
  source 1..23: mol_type = other RNA
gatctgcagagaagggtttgggg

SEQ ID NO: 704 - RNA, 23 nt, synthetic construct
  source 1..23: mol_type = other RNA
tgatctgcagagaagggtttggg

SEQ ID NO: 705 - RNA, 23 nt, synthetic construct
  source 1..23: mol_type = other RNA
gtgatctgcagagaagggtttgg

SEQ ID NO: 706 - RNA, 23 nt, synthetic construct
  source 1..23: mol_type = other RNA
gtacccctgacaaagaaggaagt

SEQ ID NO: 707 - RNA, 23 nt, synthetic construct
  source 1..23: mol_type = other RNA
taaactgaaaatttgaaagaagc

SEQ ID NO: 708 - RNA, 23 nt, synthetic construct
  source 1..23: mol_type = other RNA
atgtaaactgaaaatttgaaaga

SEQ ID NO: 709 - RNA, 23 nt, synthetic construct
  source 1..23: mol_type = other RNA
gaagcacctgaaagataaaatgt

SEQ ID NO: 710 - RNA, 23 nt, synthetic construct
  source 1..23: mol_type = other RNA
aaggcactgcaagacattaaaga

SEQ ID NO: 711 - RNA, 23 nt, synthetic construct
  source 1..23: mol_type = other RNA
aaaacctgttaaaacaagaaaga

SEQ ID NO: 712 - RNA, 23 nt, synthetic construct
  source 1..23: mol_type = other RNA
gtgaaatctgtgagaagtattga

SEQ ID NO: 713 - RNA, 23 nt, synthetic construct
  source 1..23: mol_type = other RNA
ggcctgcagcatgagagcaaaga

SEQ ID NO: 714 - RNA, 23 nt, synthetic construct
  source 1..23: mol_type = other RNA
catcctgtgccatagagtatgga

SEQ ID NO: 715 - RNA, 23 nt, synthetic construct
  source 1..23: mol_type = other RNA
tcatcctgtgccatagagtatgg

SEQ ID NO: 716 - RNA, 23 nt, synthetic construct
  source 1..23: mol_type = other RNA
tgtgattctgaaacgagacccgt

SEQ ID NO: 717 - RNA, 23 nt, synthetic construct
  source 1..23: mol_type = other RNA
ttacctgaaaagaattataatga

SEQ ID NO: 718 - RNA, 23 nt, synthetic construct
  source 1..23: mol_type = other RNA
gagtagcctgtgaaaaggagagc

SEQ ID NO: 719 - RNA, 23 nt, synthetic construct
  source 1..23: mol_type = other RNA
ggtattccttaattgtacagaga

SEQ ID NO: 720 - RNA, 23 nt, synthetic construct
  source 1..23: mol_type = other RNA
aacgctatattccatgagcaaga

SEQ ID NO: 721 - RNA, 23 nt, synthetic construct
  source 1..23: mol_type = other RNA
tcaaatcctgttcatggtgcaga

SEQ ID NO: 722 - RNA, 23 nt, synthetic construct
  source 1..23: mol_type = other RNA
cgcctgcaggtaaaagcatatgg

SEQ ID NO: 723 - RNA, 23 nt, synthetic construct
  source 1..23: mol_type = other RNA
ttcctgtaagataccaaaaaggc

SEQ ID NO: 724 - RNA, 23 nt, synthetic construct
  source 1..23: mol_type = other RNA
gttcctgtaagataccaaaaagg

SEQ ID NO: 725 - RNA, 23 nt, synthetic construct
  source 1..23: mol_type = other RNA
cagtaactgaaacagacaaatgc

SEQ ID NO: 726 - RNA, 23 nt, synthetic construct
  source 1..23: mol_type = other RNA
tcaccctgcaaaggaccaaatgt

SEQ ID NO: 727 - RNA, 23 nt, synthetic construct
  source 1..23: mol_type = other RNA
ggtcctacaggacagcaggaaga

SEQ ID NO: 728 - RNA, 23 nt, synthetic construct
  source 1..23: mol_type = other RNA
ggaggtcctacaggacagcagga

SEQ ID NO: 729 - RNA, 23 nt, synthetic construct
  source 1..23: mol_type = other RNA
tgaaggcctgtgaaatgagatga

SEQ ID NO: 730 - RNA, 23 nt, synthetic construct
  source 1..23: mol_type = other RNA
gcagctctaaattggcaatatga

SEQ ID NO: 731 - RNA, 23 nt, synthetic construct
  source 1..23: mol_type = other RNA
ccacctgggaggaaaaggagaga

SEQ ID NO: 732 - RNA, 23 nt, synthetic construct
  source 1..23: mol_type = other RNA
ggccacctgggaggaaaaggaga

SEQ ID NO: 733 - RNA, 23 nt, synthetic construct
  source 1..23: mol_type = other RNA
acagacctgtgaaggaaatgggc

SEQ ID NO: 734 - RNA, 23 nt, synthetic construct
  source 1..23: mol_type = other RNA
gacagacctgtgaaggaaatggg

SEQ ID NO: 735 - RNA, 23 nt, synthetic construct
  source 1..23: mol_type = other RNA
tgacagacctgtgaaggaaatgg

SEQ ID NO: 736 - RNA, 23 nt, synthetic construct
  source 1..23: mol_type = other RNA
ttacctcatgagtatgaaactgg

SEQ ID NO: 737 - RNA, 23 nt, synthetic construct
  source 1..23: mol_type = other RNA
ctaccttatgttgttgtacttgg

SEQ ID NO: 738 - RNA, 23 nt, synthetic construct
  source 1..23: mol_type = other RNA
acacctgttcttcagtaagacgt

SEQ ID NO: 739 - RNA, 23 nt, synthetic construct
  source 1..23: mol_type = other RNA
gacacacctgttcttcagtaaga

SEQ ID NO: 740 - RNA, 23 nt, synthetic construct
  source 1..23: mol_type = other RNA
cacagacctgcaattccccgagt

SEQ ID NO: 741 - RNA, 23 nt, synthetic construct
  source 1..23: mol_type = other RNA
ttactctgcactgtttcagctgc

SEQ ID NO: 742 - RNA, 23 nt, synthetic construct
  source 1..23: mol_type = other RNA
atcttactctgcactgtttcagc

SEQ ID NO: 743 - RNA, 23 nt, synthetic construct
  source 1..23: mol_type = other RNA
tctatacctgttggcacatgtga

SEQ ID NO: 744 - RNA, 23 nt, synthetic construct
  source 1..23: mol_type = other RNA
tttaccttcatctcttcaactgc

SEQ ID NO: 745 - RNA, 23 nt, synthetic construct
  source 1..23: mol_type = other RNA
acttacatctagcacctcagaga

SEQ ID NO: 746 - RNA, 23 nt, synthetic construct
  source 1..23: mol_type = other RNA
caacttacatctagcacctcaga

SEQ ID NO: 747 - RNA, 23 nt, synthetic construct
  source 1..23: mol_type = other RNA
gtacttgcctgggcttcctgagg

SEQ ID NO: 748 - RNA, 23 nt, synthetic construct
  source 1..23: mol_type = other RNA
atacctgtgcaacatcaatctga

SEQ ID NO: 749 - RNA, 23 nt, synthetic construct
  source 1..23: mol_type = other RNA
ataccacacaatgatttagctgt

SEQ ID NO: 750 - RNA, 23 nt, synthetic construct
  source 1..23: mol_type = other RNA
tacataccacacaatgatttagc

SEQ ID NO: 751 - RNA, 23 nt, synthetic construct
  source 1..23: mol_type = other RNA
atttaccatatctttattgaagt

SEQ ID NO: 752 - RNA, 23 nt, synthetic construct
  source 1..23: mol_type = other RNA
ctaataccttgagagcattatgt

SEQ ID NO: 753 - RNA, 23 nt, synthetic construct
  source 1..23: mol_type = other RNA
tcacaatttgtgcaaagttgagt

SEQ ID NO: 754 - RNA, 23 nt, synthetic construct
  source 1..23: mol_type = other RNA
actcacaatttgtgcaaagttga

SEQ ID NO: 755 - RNA, 23 nt, synthetic construct
  source 1..23: mol_type = other RNA
ttaccttcagagactcctcttgc

SEQ ID NO: 756 - RNA, 23 nt, synthetic construct
  source 1..23: mol_type = other RNA
tacctacccttgtcggtccttgt

SEQ ID NO: 757 - RNA, 23 nt, synthetic construct
  source 1..23: mol_type = other RNA
acttaccttaagataccatttgt

SEQ ID NO: 758 - RNA, 23 nt, synthetic construct
  source 1..23: mol_type = other RNA
aaattaccttgacttgctcaagc

SEQ ID NO: 759 - RNA, 23 nt, synthetic construct
  source 1..23: mol_type = other RNA
gtctaacctttatccactggaga

SEQ ID NO: 760 - RNA, 23 nt, synthetic construct
  source 1..23: mol_type = other RNA
tccctaccttaacgtcaaatggt

SEQ ID NO: 761 - RNA, 23 nt, synthetic construct
  source 1..23: mol_type = other RNA
ttccctaccttaacgtcaaatgg

SEQ ID NO: 762 - RNA, 23 nt, synthetic construct
  source 1..23: mol_type = other RNA
attaccttcactggctgagtggc

SEQ ID NO: 763 - RNA, 23 nt, synthetic construct
  source 1..23: mol_type = other RNA
cattaccttcactggctgagtgg

SEQ ID NO: 764 - RNA, 23 nt, synthetic construct
  source 1..23: mol_type = other RNA
ttcattaccttcactggctgagt

SEQ ID NO: 765 - RNA, 23 nt, synthetic construct
  source 1..23: mol_type = other RNA
tacttacaggctccaatagtggt

SEQ ID NO: 766 - RNA, 23 nt, synthetic construct
  source 1..23: mol_type = other RNA
atacttacaggctccaatagtgg

SEQ ID NO: 767 - RNA, 23 nt, synthetic construct
  source 1..23: mol_type = other RNA
aaacttacttcgatccgtaatga

SEQ ID NO: 768 - RNA, 23 nt, synthetic construct
  source 1..23: mol_type = other RNA
ttacttgccattgtttcatcagc

SEQ ID NO: 769 - RNA, 23 nt, synthetic construct
  source 1..23: mol_type = other RNA
ctaccctatgtacatcgttctgc

SEQ ID NO: 770 - RNA, 23 nt, synthetic construct
  source 1..23: mol_type = other RNA
attacctctgggctcctggtaga

SEQ ID NO: 771 - RNA, 23 nt, synthetic construct
  source 1..23: mol_type = other RNA
tcaattacctctgggctcctggt

SEQ ID NO: 772 - RNA, 23 nt, synthetic construct
  source 1..23: mol_type = other RNA
gtaccttgactttctcgaggtga

SEQ ID NO: 773 - RNA, 23 nt, synthetic construct
  source 1..23: mol_type = other RNA
cggtaccttgactttctcgaggt

SEQ ID NO: 774 - RNA, 23 nt, synthetic construct
  source 1..23: mol_type = other RNA
acggtaccttgactttctcgagg

SEQ ID NO: 775 - RNA, 23 nt, synthetic construct
  source 1..23: mol_type = other RNA
ttactggaaagaaagtgctgaga

SEQ ID NO: 776 - RNA, 23 nt, synthetic construct
  source 1..23: mol_type = other RNA
acttactggaaagaaagtgctga

SEQ ID NO: 777 - RNA, 23 nt, synthetic construct
  source 1..23: mol_type = other RNA
cgtcctgcaggcacagacacagc

SEQ ID NO: 778 - RNA, 23 nt, synthetic construct
  source 1..23: mol_type = other RNA
tccacctgcaaatgtaagaaaga

SEQ ID NO: 779 - RNA, 23 nt, synthetic construct
  source 1..23: mol_type = other RNA
tctttgcctgtggagagggaaga

SEQ ID NO: 780 - RNA, 23 nt, synthetic construct
  source 1..23: mol_type = other RNA
gagccctaggacagagagacaga

SEQ ID NO: 781 - RNA, 23 nt, synthetic construct
  source 1..23: mol_type = other RNA
gtcctggagccccaaggagcaga

SEQ ID NO: 782 - RNA, 23 nt, synthetic construct
  source 1..23: mol_type = other RNA
gccgtcctggagccccaaggagc

SEQ ID NO: 783 - RNA, 23 nt, synthetic construct
  source 1..23: mol_type = other RNA
cacctggagggtgacacgccagg

SEQ ID NO: 784 - RNA, 23 nt, synthetic construct
  source 1..23: mol_type = other RNA
tggccacctggagggtgacacgc

SEQ ID NO: 785 - RNA, 23 nt, synthetic construct
  source 1..23: mol_type = other RNA
tcttctggaggaggaaagcaggt

SEQ ID NO: 786 - RNA, 23 nt, synthetic construct
  source 1..23: mol_type = other RNA
ctcttctggaggaggaaagcagg

SEQ ID NO: 787 - RNA, 23 nt, synthetic construct
  source 1..23: mol_type = other RNA
ccgctctgcaaggggaggagagc

SEQ ID NO: 788 - RNA, 23 nt, synthetic construct
  source 1..23: mol_type = other RNA
agccgctctgcaaggggaggaga

SEQ ID NO: 789 - RNA, 23 nt, synthetic construct
  source 1..23: mol_type = other RNA
tgtctggaaagcagagggagggg

SEQ ID NO: 790 - RNA, 23 nt, synthetic construct
  source 1..23: mol_type = other RNA
atgtctggaaagcagagggaggg

SEQ ID NO: 791 - RNA, 23 nt, synthetic construct
  source 1..23: mol_type = other RNA
gatgtctggaaagcagagggagg

SEQ ID NO: 792 - RNA, 23 nt, synthetic construct
  source 1..23: mol_type = other RNA
cagatgtctggaaagcagaggga

SEQ ID NO: 793 - RNA, 23 nt, synthetic construct
  source 1..23: mol_type = other RNA
gttctagacagcagcgggaaggg

SEQ ID NO: 794 - RNA, 23 nt, synthetic construct
  source 1..23: mol_type = other RNA
agttctagacagcagcgggaagg

SEQ ID NO: 795 - RNA, 23 nt, synthetic construct
  source 1..23: mol_type = other RNA
agcagttctagacagcagcggga

SEQ ID NO: 796 - RNA, 23 nt, synthetic construct
  source 1..23: mol_type = other RNA
gcacctggaaggagacccagtga

SEQ ID NO: 797 - RNA, 23 nt, synthetic construct
  source 1..23: mol_type = other RNA
aagcacctggaaggagacccagt

SEQ ID NO: 798 - RNA, 23 nt, synthetic construct
  source 1..23: mol_type = other RNA
ggagccctgcaccagccagcaga

SEQ ID NO: 799 - RNA, 23 nt, synthetic construct
  source 1..23: mol_type = other RNA
cctggatctgggaggataaaggc

SEQ ID NO: 800 - RNA, 23 nt, synthetic construct
  source 1..23: mol_type = other RNA
gccctctgagaggtcggaagaga

SEQ ID NO: 801 - RNA, 23 nt, synthetic construct
  source 1..23: mol_type = other RNA
gtgccctctgagaggtcggaaga

SEQ ID NO: 802 - RNA, 23 nt, synthetic construct
  source 1..23: mol_type = other RNA
tggactacaaaacaggagacggt

SEQ ID NO: 803 - RNA, 23 nt, synthetic construct
  source 1..23: mol_type = other RNA
ttggactacaaaacaggagacgg

SEQ ID NO: 804 - RNA, 23 nt, synthetic construct
  source 1..23: mol_type = other RNA
cggcctaggaggcagaagagaga

SEQ ID NO: 805 - RNA, 23 nt, synthetic construct
  source 1..23: mol_type = other RNA
aacggcctaggaggcagaagaga

SEQ ID NO: 806 - RNA, 23 nt, synthetic construct
  source 1..23: mol_type = other RNA
tgctgaactagatgaagaggaga

SEQ ID NO: 807 - RNA, 23 nt, synthetic construct
  source 1..23: mol_type = other RNA
taccctgggggagaaaaggcaga

SEQ ID NO: 808 - RNA, 23 nt, synthetic construct
  source 1..23: mol_type = other RNA
aaataccctgggggagaaaaggc

SEQ ID NO: 809 - RNA, 23 nt, synthetic construct
  source 1..23: mol_type = other RNA
tcacctttcggtcctcctcccgc

SEQ ID NO: 810 - RNA, 23 nt, synthetic construct
  source 1..23: mol_type = other RNA
gactcacccgcttctgcaggggc

SEQ ID NO: 811 - RNA, 23 nt, synthetic construct
  source 1..23: mol_type = other RNA
ggactcacccgcttctgcagggg

SEQ ID NO: 812 - RNA, 23 nt, synthetic construct
  source 1..23: mol_type = other RNA
gctcacctcgtactctggctcgt

SEQ ID NO: 813 - RNA, 23 nt, synthetic construct
  source 1..23: mol_type = other RNA
acttaccactgagaatttgccgt

SEQ ID NO: 814 - RNA, 23 nt, synthetic construct
  source 1..23: mol_type = other RNA
actcacctgcaggacctcgtaga

SEQ ID NO: 815 - RNA, 23 nt, synthetic construct
  source 1..23: mol_type = other RNA
tttaccttctggtggctccaggc

SEQ ID NO: 816 - RNA, 23 nt, synthetic construct
  source 1..23: mol_type = other RNA
atttaccttctggtggctccagg

SEQ ID NO: 817 - RNA, 23 nt, synthetic construct
  source 1..23: mol_type = other RNA
aaacttaccctcaatgttccggc

SEQ ID NO: 818 - RNA, 23 nt, synthetic construct
  source 1..23: mol_type = other RNA
gcctcacctgcagcagttgttgt

SEQ ID NO: 819 - RNA, 23 nt, synthetic construct
  source 1..23: mol_type = other RNA
actcacaaattcctggtcgtggt

SEQ ID NO: 820 - RNA, 23 nt, synthetic construct
  source 1..23: mol_type = other RNA
cactcacaaattcctggtcgtgg

SEQ ID NO: 821 - RNA, 23 nt, synthetic construct
  source 1..23: mol_type = other RNA
acatacatgcttctgtgtgacgc

SEQ ID NO: 822 - RNA, 23 nt, synthetic construct
  source 1..23: mol_type = other RNA
acctaccgtagaggcccttgcga

SEQ ID NO: 823 - RNA, 23 nt, synthetic construct
  source 1..23: mol_type = other RNA
gtacctaccgtagaggcccttgc

SEQ ID NO: 824 - RNA, 23 nt, synthetic construct
  source 1..23: mol_type = other RNA
ctatacctcgagaaatcgcgaga

SEQ ID NO: 825 - RNA, 23 nt, synthetic construct
  source 1..23: mol_type = other RNA
ggctatacctcgagaaatcgcga

SEQ ID NO: 826 - RNA, 23 nt, synthetic construct
  source 1..23: mol_type = other RNA
ccaacctgttcataccgggaagg

SEQ ID NO: 827 - RNA, 23 nt, synthetic construct
  source 1..23: mol_type = other RNA
tcaccaacctgttcataccggga

SEQ ID NO: 828 - RNA, 23 nt, synthetic construct
  source 1..23: mol_type = other RNA
tgaccttggctatcctgccatgc

SEQ ID NO: 829 - RNA, 23 nt, synthetic construct
  source 1..23: mol_type = other RNA
cgggtacctttccatttcagtgc

SEQ ID NO: 830 - RNA, 23 nt, synthetic construct
  source 1..23: mol_type = other RNA
aggctgcagaaggagagaagagg

SEQ ID NO: 831 - RNA, 23 nt, synthetic construct
  source 1..23: mol_type = other RNA
tcaggctgcagaaggagagaaga

SEQ ID NO: 832 - RNA, 23 nt, synthetic construct
  source 1..23: mol_type = other RNA
ggcctgaatcacagggttgcagc

SEQ ID NO: 833 - RNA, 23 nt, synthetic construct
  source 1..23: mol_type = other RNA
cgtggcctgaatcacagggttgc

SEQ ID NO: 834 - RNA, 23 nt, synthetic construct
  source 1..23: mol_type = other RNA
aatctaagataggaggagaagga

SEQ ID NO: 835 - RNA, 23 nt, synthetic construct
  source 1..23: mol_type = other RNA
caatctaagataggaggagaagg

SEQ ID NO: 836 - RNA, 23 nt, synthetic construct
  source 1..23: mol_type = other RNA
acacaatctaagataggaggaga

SEQ ID NO: 837 - RNA, 23 nt, synthetic construct
  source 1..23: mol_type = other RNA
catctctgtggccggcagggaga

SEQ ID NO: 838 - RNA, 23 nt, synthetic construct
  source 1..23: mol_type = other RNA
cccatctctgtggccggcaggga

SEQ ID NO: 839 - RNA, 23 nt, synthetic construct
  source 1..23: mol_type = other RNA
tgctttctgcagagaagatggga

SEQ ID NO: 840 - RNA, 23 nt, synthetic construct
  source 1..23: mol_type = other RNA
gtgctttctgcagagaagatggg

SEQ ID NO: 841 - RNA, 23 nt, synthetic construct
  source 1..23: mol_type = other RNA
ccatactacgggtggaaaacagc

SEQ ID NO: 842 - RNA, 23 nt, synthetic construct
  source 1..23: mol_type = other RNA
ggcctgggaagggaagaagatgg

SEQ ID NO: 843 - RNA, 23 nt, synthetic construct
  source 1..23: mol_type = other RNA
ttgggcctgggaagggaagaaga

SEQ ID NO: 844 - RNA, 23 nt, synthetic construct
  source 1..23: mol_type = other RNA
gtacctgtagggtgggcggtgga

SEQ ID NO: 845 - RNA, 23 nt, synthetic construct
  source 1..23: mol_type = other RNA
ggtacctgtagggtgggcggtgg

SEQ ID NO: 846 - RNA, 23 nt, synthetic construct
  source 1..23: mol_type = other RNA
caggtacctgtagggtgggcggt

SEQ ID NO: 847 - RNA, 23 nt, synthetic construct
  source 1..23: mol_type = other RNA
ttcctgggggagggaaacaagga

SEQ ID NO: 848 - RNA, 23 nt, synthetic construct
  source 1..23: mol_type = other RNA
attcctgggggagggaaacaagg

SEQ ID NO: 849 - RNA, 23 nt, synthetic construct
  source 1..23: mol_type = other RNA
aatctgtttcagagcaaagctga

SEQ ID NO: 850 - RNA, 23 nt, synthetic construct
  source 1..23: mol_type = other RNA
gcgaatctgtttcagagcaaagc

SEQ ID NO: 851 - RNA, 23 nt, synthetic construct
  source 1..23: mol_type = other RNA
agctcctaggcgggagacagggg

SEQ ID NO: 852 - RNA, 23 nt, synthetic construct
  source 1..23: mol_type = other RNA
cagctcctaggcgggagacaggg

SEQ ID NO: 853 - RNA, 23 nt, synthetic construct
  source 1..23: mol_type = other RNA
tcagctcctaggcgggagacagg

SEQ ID NO: 854 - RNA, 23 nt, synthetic construct
  source 1..23: mol_type = other RNA
accctgtggcgggaaagagagga

SEQ ID NO: 855 - RNA, 23 nt, synthetic construct
  source 1..23: mol_type = other RNA
aaccctgtggcgggaaagagagg

SEQ ID NO: 856 - RNA, 23 nt, synthetic construct
  source 1..23: mol_type = other RNA
aaaaccctgtggcgggaaagaga

SEQ ID NO: 857 - RNA, 23 nt, synthetic construct
  source 1..23: mol_type = other RNA
cacttaccatgattgatcttagt

SEQ ID NO: 858 - RNA, 23 nt, synthetic construct
  source 1..23: mol_type = other RNA
ctcacctttgttccaggggttga

SEQ ID NO: 859 - RNA, 23 nt, synthetic construct
  source 1..23: mol_type = other RNA
cacctcacctttgttccaggggt

SEQ ID NO: 860 - RNA, 23 nt, synthetic construct
  source 1..23: mol_type = other RNA
gaactcaccgtctgcagcacagc

SEQ ID NO: 861 - RNA, 23 nt, synthetic construct
  source 1..23: mol_type = other RNA
ctcacagtttaggaagtaggggg

SEQ ID NO: 862 - RNA, 23 nt, synthetic construct
  source 1..23: mol_type = other RNA
actcacagtttaggaagtagggg

SEQ ID NO: 863 - RNA, 23 nt, synthetic construct
  source 1..23: mol_type = other RNA
cactcacagtttaggaagtaggg

SEQ ID NO: 864 - RNA, 23 nt, synthetic construct
  source 1..23: mol_type = other RNA
acactcacagtttaggaagtagg

SEQ ID NO: 865 - RNA, 23 nt, synthetic construct
  source 1..23: mol_type = other RNA
cctcacctccagggcatcaatgt

SEQ ID NO: 866 - RNA, 23 nt, synthetic construct
  source 1..23: mol_type = other RNA
gtacctggtggttgtggcgctgg

SEQ ID NO: 867 - RNA, 23 nt, synthetic construct
  source 1..23: mol_type = other RNA
gcagtacctggtggttgtggcgc

SEQ ID NO: 868 - RNA, 23 nt, synthetic construct
  source 1..23: mol_type = other RNA
ttcctgaatgggaagaaaagagg

SEQ ID NO: 869 - RNA, 23 nt, synthetic construct
  source 1..23: mol_type = other RNA
tgttcctgaatgggaagaaaaga

SEQ ID NO: 870 - RNA, 23 nt, synthetic construct
  source 1..23: mol_type = other RNA
caacctgtgaactcacagagaga

SEQ ID NO: 871 - RNA, 23 nt, synthetic construct
  source 1..23: mol_type = other RNA
ggcaacctgtgaactcacagaga

SEQ ID NO: 872 - RNA, 23 nt, synthetic construct
  source 1..23: mol_type = other RNA
tacacctagatgaaatgaacagt

SEQ ID NO: 873 - RNA, 23 nt, synthetic construct
  source 1..23: mol_type = other RNA
gcagactgaaaagagagcgttga

SEQ ID NO: 874 - RNA, 23 nt, synthetic construct
  source 1..23: mol_type = other RNA
cacttaccacaggaaactgtagc

SEQ ID NO: 875 - RNA, 23 nt, synthetic construct
  source 1..23: mol_type = other RNA
ctcaccggtactctgccttgtga

SEQ ID NO: 876 - RNA, 23 nt, synthetic construct
  source 1..23: mol_type = other RNA
tactcaccggtactctgccttgt

SEQ ID NO: 877 - RNA, 23 nt, synthetic construct
  source 1..23: mol_type = other RNA
caattaccaatttctgaaagggc

SEQ ID NO: 878 - RNA, 23 nt, synthetic construct
  source 1..23: mol_type = other RNA
acaattaccaatttctgaaaggg

SEQ ID NO: 879 - RNA, 23 nt, synthetic construct
  source 1..23: mol_type = other RNA
attaccaggtaaagttcttttgc

SEQ ID NO: 880 - RNA, 23 nt, synthetic construct
  source 1..23: mol_type = other RNA
cctttacttctcttccttacagt

SEQ ID NO: 881 - RNA, 23 nt, synthetic construct
  source 1..23: mol_type = other RNA
ctcaccagagttgtccccagtgt

SEQ ID NO: 882 - RNA, 23 nt, synthetic construct
  source 1..23: mol_type = other RNA
tactcaccagagttgtccccagt

SEQ ID NO: 883 - RNA, 23 nt, synthetic construct
  source 1..23: mol_type = other RNA
acttacccatcaaagcagtgggc

SEQ ID NO: 884 - RNA, 23 nt, synthetic construct
  source 1..23: mol_type = other RNA
cacttacccatcaaagcagtggg

SEQ ID NO: 885 - RNA, 23 nt, synthetic construct
  source 1..23: mol_type = other RNA
acacttacccatcaaagcagtgg

SEQ ID NO: 886 - RNA, 23 nt, synthetic construct
  source 1..23: mol_type = other RNA
ataccagtgtaattcaaaggagc

SEQ ID NO: 887 - RNA, 23 nt, synthetic construct
  source 1..23: mol_type = other RNA
acataccagtgtaattcaaagga

SEQ ID NO: 888 - RNA, 23 nt, synthetic construct
  source 1..23: mol_type = other RNA
tacataccagtgtaattcaaagg

SEQ ID NO: 889 - RNA, 23 nt, synthetic construct
  source 1..23: mol_type = other RNA
cttacctttctccttcgagaagc

SEQ ID NO: 890 - RNA, 23 nt, synthetic construct
  source 1..23: mol_type = other RNA
atgcttacctttctccttcgaga

SEQ ID NO: 891 - RNA, 23 nt, synthetic construct
  source 1..23: mol_type = other RNA
atcctggccccatgcaaggagga

SEQ ID NO: 892 - RNA, 23 nt, synthetic construct
  source 1..23: mol_type = other RNA
gatcctggccccatgcaaggagg

SEQ ID NO: 893 - RNA, 23 nt, synthetic construct
  source 1..23: mol_type = other RNA
cggatcctggccccatgcaagga

SEQ ID NO: 894 - RNA, 23 nt, synthetic construct
  source 1..23: mol_type = other RNA
acggatcctggccccatgcaagg

SEQ ID NO: 895 - RNA, 23 nt, synthetic construct
  source 1..23: mol_type = other RNA
aggcctgcagaagccagagaggc

SEQ ID NO: 896 - RNA, 23 nt, synthetic construct
  source 1..23: mol_type = other RNA
aaggcctgcagaagccagagagg

SEQ ID NO: 897 - RNA, 23 nt, synthetic construct
  source 1..23: mol_type = other RNA
tcaaggcctgcagaagccagaga

SEQ ID NO: 898 - RNA, 23 nt, synthetic construct
  source 1..23: mol_type = other RNA
cgtctttccaaggcgacatttgt

SEQ ID NO: 899 - RNA, 23 nt, synthetic construct
  source 1..23: mol_type = other RNA
ggcctgctcgacgaacacaagga

SEQ ID NO: 900 - RNA, 23 nt, synthetic construct
  source 1..23: mol_type = other RNA
tggcctgctcgacgaacacaagg

SEQ ID NO: 901 - RNA, 23 nt, synthetic construct
  source 1..23: mol_type = other RNA
tccaggcctgggaggaacaaagc

SEQ ID NO: 902 - RNA, 23 nt, synthetic construct
  source 1..23: mol_type = other RNA
gacctggaaaggtgaggaggtgg

SEQ ID NO: 903 - RNA, 23 nt, synthetic construct
  source 1..23: mol_type = other RNA
atgacctggaaaggtgaggaggt

SEQ ID NO: 904 - RNA, 23 nt, synthetic construct
  source 1..23: mol_type = other RNA
gatgacctggaaaggtgaggagg

SEQ ID NO: 905 - RNA, 23 nt, synthetic construct
  source 1..23: mol_type = other RNA
tgcctggtgcaggggtgaatggt

SEQ ID NO: 906 - RNA, 23 nt, synthetic construct
  source 1..23: mol_type = other RNA
atgcctggtgcaggggtgaatgg

SEQ ID NO: 907 - RNA, 23 nt, synthetic construct
  source 1..23: mol_type = other RNA
tgggccttagagtcaaagacgga

SEQ ID NO: 908 - RNA, 23 nt, synthetic construct
  source 1..23: mol_type = other RNA
ttgggccttagagtcaaagacgg

SEQ ID NO: 909 - RNA, 23 nt, synthetic construct
  source 1..23: mol_type = other RNA
tgcagcctggggcagaggaaagc

SEQ ID NO: 910 - RNA, 23 nt, synthetic construct
  source 1..23: mol_type = other RNA
ggtcacctgccagagcccgagga

SEQ ID NO: 911 - RNA, 23 nt, synthetic construct
  source 1..23: mol_type = other RNA
cggtcacctgccagagcccgagg

SEQ ID NO: 912 - RNA, 23 nt, synthetic construct
  source 1..23: mol_type = other RNA
ccgcaccttggcgcagcggtgga

SEQ ID NO: 913 - RNA, 23 nt, synthetic construct
  source 1..23: mol_type = other RNA
cccgcaccttggcgcagcggtgg

SEQ ID NO: 914 - RNA, 23 nt, synthetic construct
  source 1..23: mol_type = other RNA
gctcaccagctccagcaggtcgc

SEQ ID NO: 915 - RNA, 23 nt, synthetic construct
  source 1..23: mol_type = other RNA
cttacctgtctgtggaagcgggt

SEQ ID NO: 916 - RNA, 23 nt, synthetic construct
  source 1..23: mol_type = other RNA
gcttacctgtctgtggaagcggg

SEQ ID NO: 917 - RNA, 23 nt, synthetic construct
  source 1..23: mol_type = other RNA
tgcttacctgtctgtggaagcgg

SEQ ID NO: 918 - RNA, 23 nt, synthetic construct
  source 1..23: mol_type = other RNA
tcacttacctatgagggtgccgc

SEQ ID NO: 919 - RNA, 23 nt, synthetic construct
  source 1..23: mol_type = other RNA
cctacctcgggagctgaggctgg

SEQ ID NO: 920 - RNA, 23 nt, synthetic construct
  source 1..23: mol_type = other RNA
gcacctacctcgggagctgaggc

SEQ ID NO: 921 - RNA, 23 nt, synthetic construct
  source 1..23: mol_type = other RNA
ttaccagccacgtgggcagcagc

SEQ ID NO: 922 - RNA, 23 nt, synthetic construct
  source 1..23: mol_type = other RNA
gacttaccagccacgtgggcagc

SEQ ID NO: 923 - RNA, 23 nt, synthetic construct
  source 1..23: mol_type = other RNA
ttacctgccccatgggtgctggg

SEQ ID NO: 924 - RNA, 23 nt, synthetic construct
  source 1..23: mol_type = other RNA
cttacctgccccatgggtgctgg

SEQ ID NO: 925 - RNA, 23 nt, synthetic construct
  source 1..23: mol_type = other RNA
ctgcttacctgccccatgggtgc

SEQ ID NO: 926 - RNA, 23 nt, synthetic construct
  source 1..23: mol_type = other RNA
tcacctccatgcgctcgccccgc

SEQ ID NO: 927 - RNA, 23 nt, synthetic construct
  source 1..23: mol_type = other RNA
cctcctacctgtgaggacgtggc

SEQ ID NO: 928 - RNA, 23 nt, synthetic construct
  source 1..23: mol_type = other RNA
tcacctgctcctgaggggccggg

SEQ ID NO: 929 - RNA, 23 nt, synthetic construct
  source 1..23: mol_type = other RNA
ttcacctgctcctgaggggccgg

SEQ ID NO: 930 - RNA, 23 nt, synthetic construct
  source 1..23: mol_type = other RNA
ctcttcacctgctcctgaggggc

SEQ ID NO: 931 - RNA, 23 nt, synthetic construct
  source 1..23: mol_type = other RNA
gagtctgagagatggagagaggt

SEQ ID NO: 932 - RNA, 23 nt, synthetic construct
  source 1..23: mol_type = other RNA
ggagtctgagagatggagagagg

SEQ ID NO: 933 - RNA, 23 nt, synthetic construct
  source 1..23: mol_type = other RNA
ggggagtctgagagatggagaga

SEQ ID NO: 934 - RNA, 23 nt, synthetic construct
  source 1..23: mol_type = other RNA
tctctctggaagggcacaaaggt

SEQ ID NO: 935 - RNA, 23 nt, synthetic construct
  source 1..23: mol_type = other RNA
ttctctctggaagggcacaaagg

SEQ ID NO: 936 - RNA, 23 nt, synthetic construct
  source 1..23: mol_type = other RNA
tccctgcagagaaacacacttgg

SEQ ID NO: 937 - RNA, 23 nt, synthetic construct
  source 1..23: mol_type = other RNA
ctccttctttgaggagaaaggga

SEQ ID NO: 938 - RNA, 23 nt, synthetic construct
  source 1..23: mol_type = other RNA
cctccttctttgaggagaaaggg

SEQ ID NO: 939 - RNA, 23 nt, synthetic construct
  source 1..23: mol_type = other RNA
acctacctaagaaccatcctggc

SEQ ID NO: 940 - RNA, 23 nt, synthetic construct
  source 1..23: mol_type = other RNA
cacctacctaagaaccatcctgg

SEQ ID NO: 941 - RNA, 23 nt, synthetic construct
  source 1..23: mol_type = other RNA
gcacctgtcaccctgagctctgc

SEQ ID NO: 942 - RNA, 23 nt, synthetic construct
  source 1..23: mol_type = other RNA
gttacctcgtgcggcccgggagc

SEQ ID NO: 943 - RNA, 23 nt, synthetic construct
  source 1..23: mol_type = other RNA
acgttacctcgtgcggcccggga

SEQ ID NO: 944 - RNA, 23 nt, synthetic construct
  source 1..23: mol_type = other RNA
gacgttacctcgtgcggcccggg

SEQ ID NO: 945 - RNA, 23 nt, synthetic construct
  source 1..23: mol_type = other RNA
actcaccaggggctggccggtgc

SEQ ID NO: 946 - RNA, 23 nt, synthetic construct
  source 1..23: mol_type = other RNA
agactcaccaggggctggccggt

SEQ ID NO: 947 - RNA, 23 nt, synthetic construct
  source 1..23: mol_type = other RNA
agcctggaagagaaaggaaaggc

SEQ ID NO: 948 - RNA, 23 nt, synthetic construct
  source 1..23: mol_type = other RNA
cagcctggaagagaaaggaaagg

SEQ ID NO: 949 - RNA, 23 nt, synthetic construct
  source 1..23: mol_type = other RNA
atagatctgtccaaaagagaaga

SEQ ID NO: 950 - RNA, 23 nt, synthetic construct
  source 1..23: mol_type = other RNA
gtgctgaaataaagaaaaagggg

SEQ ID NO: 951 - RNA, 23 nt, synthetic construct
  source 1..23: mol_type = other RNA
tgtgctgaaataaagaaaaaggg

SEQ ID NO: 952 - RNA, 23 nt, synthetic construct
  source 1..23: mol_type = other RNA
ttgtgctgaaataaagaaaaagg

SEQ ID NO: 953 - RNA, 23 nt, synthetic construct
  source 1..23: mol_type = other RNA
ggacctgggaagaagccacatgt

SEQ ID NO: 954 - RNA, 23 nt, synthetic construct
  source 1..23: mol_type = other RNA
agacctacagtgtaggggagaga

SEQ ID NO: 955 - RNA, 23 nt, synthetic construct
  source 1..23: mol_type = other RNA
gcagacctacagtgtaggggaga

SEQ ID NO: 956 - RNA, 23 nt, synthetic construct
  source 1..23: mol_type = other RNA
ttaccaaggtcgtacccacacgt

SEQ ID NO: 957 - RNA, 23 nt, synthetic construct
  source 1..23: mol_type = other RNA
cttacctcttcactgttggtggc

SEQ ID NO: 958 - RNA, 23 nt, synthetic construct
  source 1..23: mol_type = other RNA
gcttacctcttcactgttggtgg

SEQ ID NO: 959 - RNA, 23 nt, synthetic construct
  source 1..23: mol_type = other RNA
aggcttacctcttcactgttggt

SEQ ID NO: 960 - RNA, 23 nt, synthetic construct
  source 1..23: mol_type = other RNA
cacttactgagattcatcattgt

SEQ ID NO: 961 - RNA, 23 nt, synthetic construct
  source 1..23: mol_type = other RNA
ctaccttcagattggagagctgg

SEQ ID NO: 962 - RNA, 23 nt, synthetic construct
  source 1..23: mol_type = other RNA
ggcctaccttcagattggagagc

SEQ ID NO: 963 - RNA, 23 nt, synthetic construct
  source 1..23: mol_type = other RNA
tgcgcacctggcattcatgtggc

SEQ ID NO: 964 - RNA, 23 nt, synthetic construct
  source 1..23: mol_type = other RNA
ctgcgcacctggcattcatgtgg

SEQ ID NO: 965 - RNA, 23 nt, synthetic construct
  source 1..23: mol_type = other RNA
tattaactgaggagagagaaaga

SEQ ID NO: 966 - RNA, 23 nt, synthetic construct
  source 1..23: mol_type = other RNA
ttcccacctatagcaaaaacaga

SEQ ID NO: 967 - RNA, 23 nt, synthetic construct
  source 1..23: mol_type = other RNA
ttacttctgtgaagaaagccagc

SEQ ID NO: 968 - RNA, 23 nt, synthetic construct
  source 1..23: mol_type = other RNA
gatgccctgtagcgggaaagaga

SEQ ID NO: 969 - RNA, 23 nt, synthetic construct
  source 1..23: mol_type = other RNA
actcacccgacttctgaacgtgc

SEQ ID NO: 970 - RNA, 23 nt, synthetic construct
  source 1..23: mol_type = other RNA
ccactcacccgacttctgaacgt

SEQ ID NO: 971 - RNA, 23 nt, synthetic construct
  source 1..23: mol_type = other RNA
ttactatgtctcagtggatgggc

SEQ ID NO: 972 - RNA, 23 nt, synthetic construct
  source 1..23: mol_type = other RNA
tttactatgtctcagtggatggg

SEQ ID NO: 973 - RNA, 23 nt, synthetic construct
  source 1..23: mol_type = other RNA
ctttactatgtctcagtggatgg

SEQ ID NO: 974 - RNA, 23 nt, synthetic construct
  source 1..23: mol_type = other RNA
tgcttaccatacagccacacaga

SEQ ID NO: 975 - RNA, 23 nt, synthetic construct
  source 1..23: mol_type = other RNA
ctcaccttctgagaagatgatgt

SEQ ID NO: 976 - RNA, 23 nt, synthetic construct
  source 1..23: mol_type = other RNA
aaactcaccttctgagaagatga

SEQ ID NO: 977 - RNA, 23 nt, synthetic construct
  source 1..23: mol_type = other RNA
aactcacctctaaaccctggggt

SEQ ID NO: 978 - RNA, 23 nt, synthetic construct
  source 1..23: mol_type = other RNA
taactcacctctaaaccctgggg

SEQ ID NO: 979 - RNA, 23 nt, synthetic construct
  source 1..23: mol_type = other RNA
taacttacctgcccactgttagc

SEQ ID NO: 980 - RNA, 23 nt, synthetic construct
  source 1..23: mol_type = other RNA
cctacctcccactgcattacagc

SEQ ID NO: 981 - RNA, 23 nt, synthetic construct
  source 1..23: mol_type = other RNA
ccttacctggtggttgagccaga

SEQ ID NO: 982 - RNA, 23 nt, synthetic construct
  source 1..23: mol_type = other RNA
aactttctaaaaggaaaaacaga

SEQ ID NO: 983 - RNA, 23 nt, synthetic construct
  source 1..23: mol_type = other RNA
tcgtatctgtaaaaccaagaggc

SEQ ID NO: 984 - RNA, 23 nt, synthetic construct
  source 1..23: mol_type = other RNA
ttcgtatctgtaaaaccaagagg

SEQ ID NO: 985 - RNA, 23 nt, synthetic construct
  source 1..23: mol_type = other RNA
ttacctgggctggggaagaaggt

SEQ ID NO: 986 - RNA, 23 nt, synthetic construct
  source 1..23: mol_type = other RNA
cttacctgggctggggaagaagg

SEQ ID NO: 987 - RNA, 23 nt, synthetic construct
  source 1..23: mol_type = other RNA
gcccttacctgggctggggaaga

SEQ ID NO: 988 - RNA, 23 nt, synthetic construct
  source 1..23: mol_type = other RNA
cggtgccctgggtgtagagaaga

SEQ ID NO: 989 - RNA, 23 nt, synthetic construct
  source 1..23: mol_type = other RNA
taccacctatgagagaagacaga

SEQ ID NO: 990 - RNA, 23 nt, synthetic construct
  source 1..23: mol_type = other RNA
ctcaccgtagggccagcctcaga

SEQ ID NO: 991 - RNA, 23 nt, synthetic construct
  source 1..23: mol_type = other RNA
caacttacccagaggcaaatggc

SEQ ID NO: 992 - RNA, 23 nt, synthetic construct
  source 1..23: mol_type = other RNA
actcacctctgcatgctcatgga

SEQ ID NO: 993 - RNA, 23 nt, synthetic construct
  source 1..23: mol_type = other RNA
tactcacctctgcatgctcatgg

SEQ ID NO: 994 - RNA, 23 nt, synthetic construct
  source 1..23: mol_type = other RNA
accactgaggacagaaagagagc

SEQ ID NO: 995 - RNA, 23 nt, synthetic construct
  source 1..23: mol_type = other RNA
ggaccactgaggacagaaagaga

SEQ ID NO: 996 - RNA, 23 nt, synthetic construct
  source 1..23: mol_type = other RNA
caccactgcatgagaggcgatga

SEQ ID NO: 997 - RNA, 23 nt, synthetic construct
  source 1..23: mol_type = other RNA
aatctggaaaggaaggaagcaga

SEQ ID NO: 998 - RNA, 23 nt, synthetic construct
  source 1..23: mol_type = other RNA
cataatctggaaaggaaggaagc

SEQ ID NO: 999 - RNA, 23 nt, synthetic construct
  source 1..23: mol_type = other RNA
ggtctgcaatgggtagggagaga

SEQ ID NO: 1000 - RNA, 23 nt, synthetic construct
  source 1..23: mol_type = other RNA
ttggtctgcaatgggtagggaga

SEQ ID NO: 1001 - RNA, 23 nt, synthetic construct
  source 1..23: mol_type = other RNA
ctttggtctgcaatgggtaggga

SEQ ID NO: 1002 - RNA, 23 nt, synthetic construct
  source 1..23: mol_type = other RNA
gcttaccttggcatggtggaggt

SEQ ID NO: 1003 - RNA, 23 nt, synthetic construct
  source 1..23: mol_type = other RNA
cgcttaccttggcatggtggagg

SEQ ID NO: 1004 - RNA, 23 nt, synthetic construct
  source 1..23: mol_type = other RNA
actcaccttcgtgatgattctgc

SEQ ID NO: 1005 - RNA, 23 nt, synthetic construct
  source 1..23: mol_type = other RNA
cccacctgcatggtgatgttgga

SEQ ID NO: 1006 - RNA, 23 nt, synthetic construct
  source 1..23: mol_type = other RNA
gcccacctgcatggtgatgttgg

SEQ ID NO: 1007 - RNA, 23 nt, synthetic construct
  source 1..23: mol_type = other RNA
tcacctgcattcacatttgttgt

SEQ ID NO: 1008 - RNA, 23 nt, synthetic construct
  source 1..23: mol_type = other RNA
tcctcacctgcattcacatttgt

SEQ ID NO: 1009 - RNA, 23 nt, synthetic construct
  source 1..23: mol_type = other RNA
gttgtactgggggccagggaggc

SEQ ID NO: 1010 - RNA, 23 nt, synthetic construct
  source 1..23: mol_type = other RNA
ggttgtactgggggccagggagg

SEQ ID NO: 1011 - RNA, 23 nt, synthetic construct
  source 1..23: mol_type = other RNA
aaccaacctgcaagtacgttcgt

SEQ ID NO: 1012 - RNA, 23 nt, synthetic construct
  source 1..23: mol_type = other RNA
ttccctgaaatccagacaggaga

SEQ ID NO: 1013 - RNA, 23 nt, synthetic construct
  source 1..23: mol_type = other RNA
gtcctggggagatgatgcacagt

SEQ ID NO: 1014 - RNA, 23 nt, synthetic construct
  source 1..23: mol_type = other RNA
cctgcaaagcagcagacatcagg

SEQ ID NO: 1015 - RNA, 23 nt, synthetic construct
  source 1..23: mol_type = other RNA
accttggaagtggacgtaggtgt

SEQ ID NO: 1016 - RNA, 23 nt, synthetic construct
  source 1..23: mol_type = other RNA
ttaccttggaagtggacgtaggt

SEQ ID NO: 1017 - RNA, 23 nt, synthetic construct
  source 1..23: mol_type = other RNA
cttaccttggaagtggacgtagg

SEQ ID NO: 1018 - RNA, 23 nt, synthetic construct
  source 1..23: mol_type = other RNA
tacctcccccaccctgatgcggt

SEQ ID NO: 1019 - RNA, 23 nt, synthetic construct
  source 1..23: mol_type = other RNA
atacctcccccaccctgatgcgg

SEQ ID NO: 1020 - RNA, 23 nt, synthetic construct
  source 1..23: mol_type = other RNA
acatacctcccccaccctgatgc

SEQ ID NO: 1021 - RNA, 23 nt, synthetic construct
  source 1..23: mol_type = other RNA
tctggatatagagagtaggttgg

SEQ ID NO: 1022 - RNA, 23 nt, synthetic construct
  source 1..23: mol_type = other RNA
aagtctggatatagagagtaggt

SEQ ID NO: 1023 - RNA, 23 nt, synthetic construct
  source 1..23: mol_type = other RNA
aaagtctggatatagagagtagg

SEQ ID NO: 1024 - RNA, 23 nt, synthetic construct
  source 1..23: mol_type = other RNA
aatgcctagaatcaataaaatgt

SEQ ID NO: 1025 - RNA, 23 nt, synthetic construct
  source 1..23: mol_type = other RNA
cctcctaaaggagatagatatgc

SEQ ID NO: 1026 - RNA, 23 nt, synthetic construct
  source 1..23: mol_type = other RNA
actttaagtgaagttacttctgg

SEQ ID NO: 1027 - RNA, 23 nt, synthetic construct
  source 1..23: mol_type = other RNA
acctgatataacatcacagtaga

SEQ ID NO: 1028 - RNA, 23 nt, synthetic construct
  source 1..23: mol_type = other RNA
tttacctgatataacatcacagt

SEQ ID NO: 1029 - RNA, 23 nt, synthetic construct
  source 1..23: mol_type = other RNA
acctgaataaccctctggacagt

SEQ ID NO: 1030 - RNA, 23 nt, synthetic construct
  source 1..23: mol_type = other RNA
agatacctgaataaccctctgga

SEQ ID NO: 1031 - RNA, 23 nt, synthetic construct
  source 1..23: mol_type = other RNA
agctcctgaggaaagagcagggc

SEQ ID NO: 1032 - RNA, 23 nt, synthetic construct
  source 1..23: mol_type = other RNA
cccctaaatcagtcaggggaagc

SEQ ID NO: 1033 - RNA, 23 nt, synthetic construct
  source 1..23: mol_type = other RNA
ttacgggcagaggccaggagcgc

SEQ ID NO: 1034 - RNA, 23 nt, synthetic construct
  source 1..23: mol_type = other RNA
gcttacgggcagaggccaggagc

SEQ ID NO: 1035 - RNA, 23 nt, synthetic construct
  source 1..23: mol_type = other RNA
acctggcctgctgggccacctgg

SEQ ID NO: 1036 - RNA, 23 nt, synthetic construct
  source 1..23: mol_type = other RNA
acctgaggaatatcgggaaaaga

SEQ ID NO: 1037 - RNA, 23 nt, synthetic construct
  source 1..23: mol_type = other RNA
ctcacgctggatagcctccaggc

SEQ ID NO: 1038 - RNA, 23 nt, synthetic construct
  source 1..23: mol_type = other RNA
actcacgctggatagcctccagg

SEQ ID NO: 1039 - RNA, 23 nt, synthetic construct
  source 1..23: mol_type = other RNA
taccccacttaactatcttgggc

SEQ ID NO: 1040 - RNA, 23 nt, synthetic construct
  source 1..23: mol_type = other RNA
ttaccccacttaactatcttggg

SEQ ID NO: 1041 - RNA, 23 nt, synthetic construct
  source 1..23: mol_type = other RNA
cttaccccacttaactatcttgg

SEQ ID NO: 1042 - RNA, 23 nt, synthetic construct
  source 1..23: mol_type = other RNA
tcctgtgtgagcagaaaagagga

SEQ ID NO: 1043 - RNA, 23 nt, synthetic construct
  source 1..23: mol_type = other RNA
ttcctgtgtgagcagaaaagagg

SEQ ID NO: 1044 - RNA, 23 nt, synthetic construct
  source 1..23: mol_type = other RNA
gcttcctgtgtgagcagaaaaga

SEQ ID NO: 1045 - RNA, 23 nt, synthetic construct
  source 1..23: mol_type = other RNA
cctgtggggaaacgagggtcagc

SEQ ID NO: 1046 - RNA, 23 nt, synthetic construct
  source 1..23: mol_type = other RNA
ggcccctgtggggaaacgagggt

SEQ ID NO: 1047 - RNA, 23 nt, synthetic construct
  source 1..23: mol_type = other RNA
gtctagtgaggagaaagagggga

SEQ ID NO: 1048 - RNA, 23 nt, synthetic construct
  source 1..23: mol_type = other RNA
agtctagtgaggagaaagagggg

SEQ ID NO: 1049 - RNA, 23 nt, synthetic construct
  source 1..23: mol_type = other RNA
aagtctagtgaggagaaagaggg

SEQ ID NO: 1050 - RNA, 23 nt, synthetic construct
  source 1..23: mol_type = other RNA
caagtctagtgaggagaaagagg

SEQ ID NO: 1051 - RNA, 23 nt, synthetic construct
  source 1..23: mol_type = other RNA
acatctaggagaggaagagagga

SEQ ID NO: 1052 - RNA, 23 nt, synthetic construct
  source 1..23: mol_type = other RNA
aacatctaggagaggaagagagg

SEQ ID NO: 1053 - RNA, 23 nt, synthetic construct
  source 1..23: mol_type = other RNA
actctgatgggagacaccagggt

SEQ ID NO: 1054 - RNA, 23 nt, synthetic construct
  source 1..23: mol_type = other RNA
cactctgatgggagacaccaggg

SEQ ID NO: 1055 - RNA, 23 nt, synthetic construct
  source 1..23: mol_type = other RNA
tcactctgatgggagacaccagg

SEQ ID NO: 1056 - RNA, 23 nt, synthetic construct
  source 1..23: mol_type = other RNA
tcttatggagaggaaagaagggg

SEQ ID NO: 1057 - RNA, 23 nt, synthetic construct
  source 1..23: mol_type = other RNA
ttcttatggagaggaaagaaggg

SEQ ID NO: 1058 - RNA, 23 nt, synthetic construct
  source 1..23: mol_type = other RNA
tttcttatggagaggaaagaagg

SEQ ID NO: 1059 - RNA, 23 nt, synthetic construct
  source 1..23: mol_type = other RNA
agtaccttcagggccatctgaga

SEQ ID NO: 1060 - RNA, 23 nt, synthetic construct
  source 1..23: mol_type = other RNA
cacctgcccacagcaggggcagc

SEQ ID NO: 1061 - RNA, 23 nt, synthetic construct
  source 1..23: mol_type = other RNA
actcacctgcccacagcaggggc

SEQ ID NO: 1062 - RNA, 23 nt, synthetic construct
  source 1..23: mol_type = other RNA
cacctgtcacatgcacagagagc

SEQ ID NO: 1063 - RNA, 23 nt, synthetic construct
  source 1..23: mol_type = other RNA
ctcacctgtcacatgcacagaga

SEQ ID NO: 1064 - RNA, 23 nt, synthetic construct
  source 1..23: mol_type = other RNA
cttacaggtgacgttgagctgga

SEQ ID NO: 1065 - RNA, 23 nt, synthetic construct
  source 1..23: mol_type = other RNA
acttacaggtgacgttgagctgg

SEQ ID NO: 1066 - RNA, 23 nt, synthetic construct
  source 1..23: mol_type = other RNA
acctgagccatctcctggaaaga

SEQ ID NO: 1067 - RNA, 23 nt, synthetic construct
  source 1..23: mol_type = other RNA
tcctacctgagccatctcctgga

SEQ ID NO: 1068 - RNA, 23 nt, synthetic construct
  source 1..23: mol_type = other RNA
acatgaagaagatgaggcagaga

SEQ ID NO: 1069 - RNA, 23 nt, synthetic construct
  source 1..23: mol_type = other RNA
tcacatgaagaagatgaggcaga

SEQ ID NO: 1070 - RNA, 23 nt, synthetic construct
  source 1..23: mol_type = other RNA
accggggaggctgaccctgtggt

SEQ ID NO: 1071 - RNA, 23 nt, synthetic construct
  source 1..23: mol_type = other RNA
caccggggaggctgaccctgtgg

SEQ ID NO: 1072 - RNA, 23 nt, synthetic construct
  source 1..23: mol_type = other RNA
ctcaccggggaggctgaccctgt

SEQ ID NO: 1073 - RNA, 23 nt, synthetic construct
  source 1..23: mol_type = other RNA
tctgcagagaagggtttggggga

SEQ ID NO: 1074 - RNA, 23 nt, synthetic construct
  source 1..23: mol_type = other RNA
atctgcagagaagggtttggggg

SEQ ID NO: 1075 - RNA, 23 nt, synthetic construct
  source 1..23: mol_type = other RNA
gatctgcagagaagggtttgggg

SEQ ID NO: 1076 - RNA, 23 nt, synthetic construct
  source 1..23: mol_type = other RNA
tgatctgcagagaagggtttggg

SEQ ID NO: 1077 - RNA, 23 nt, synthetic construct
  source 1..23: mol_type = other RNA
gtgatctgcagagaagggtttgg

SEQ ID NO: 1078 - RNA, 23 nt, synthetic construct
  source 1..23: mol_type = other RNA
gctgcacaataaaataaattggg

SEQ ID NO: 1079 - RNA, 23 nt, synthetic construct
  source 1..23: mol_type = other RNA
tgctgcacaataaaataaattgg

SEQ ID NO: 1080 - RNA, 23 nt, synthetic construct
  source 1..23: mol_type = other RNA
taaactgaaaatttgaaagaagc

SEQ ID NO: 1081 - RNA, 23 nt, synthetic construct
  source 1..23: mol_type = other RNA
acctggagaagagacaatcaagc

SEQ ID NO: 1082 - RNA, 23 nt, synthetic construct
  source 1..23: mol_type = other RNA
aaaacctgttaaaacaagaaaga

SEQ ID NO: 1083 - RNA, 23 nt, synthetic construct
  source 1..23: mol_type = other RNA
tctgtgagaagtattgaaacaga

SEQ ID NO: 1084 - RNA, 23 nt, synthetic construct
  source 1..23: mol_type = other RNA
ggcctgcagcatgagagcaaaga

SEQ ID NO: 1085 - RNA, 23 nt, synthetic construct
  source 1..23: mol_type = other RNA
catcctgtgccatagagtatgga

SEQ ID NO: 1086 - RNA, 23 nt, synthetic construct
  source 1..23: mol_type = other RNA
tcatcctgtgccatagagtatgg

SEQ ID NO: 1087 - RNA, 23 nt, synthetic construct
  source 1..23: mol_type = other RNA
actttatcaaaagggaaaaaaga

SEQ ID NO: 1088 - RNA, 23 nt, synthetic construct
  source 1..23: mol_type = other RNA
tctgtaaggacagtgtaaaaagg

SEQ ID NO: 1089 - RNA, 23 nt, synthetic construct
  source 1..23: mol_type = other RNA
ttacctgaaaagaattataatga

SEQ ID NO: 1090 - RNA, 23 nt, synthetic construct
  source 1..23: mol_type = other RNA
gcctgtgaaaaggagagcattga

SEQ ID NO: 1091 - RNA, 23 nt, synthetic construct
  source 1..23: mol_type = other RNA
cgctatattccatgagcaagaga

SEQ ID NO: 1092 - RNA, 23 nt, synthetic construct
  source 1..23: mol_type = other RNA
aacgctatattccatgagcaaga

SEQ ID NO: 1093 - RNA, 23 nt, synthetic construct
  source 1..23: mol_type = other RNA
tgctggtatagatatacaaaaga

SEQ ID NO: 1094 - RNA, 23 nt, synthetic construct
  source 1..23: mol_type = other RNA
gcctgcaggtaaaagcatatgga

SEQ ID NO: 1095 - RNA, 23 nt, synthetic construct
  source 1..23: mol_type = other RNA
cgcctgcaggtaaaagcatatgg

SEQ ID NO: 1096 - RNA, 23 nt, synthetic construct
  source 1..23: mol_type = other RNA
ttcctgtaagataccaaaaaggc

SEQ ID NO: 1097 - RNA, 23 nt, synthetic construct
  source 1..23: mol_type = other RNA
gttcctgtaagataccaaaaagg

SEQ ID NO: 1098 - RNA, 23 nt, synthetic construct
  source 1..23: mol_type = other RNA
tcaccctgcaaaggaccaaatgt

SEQ ID NO: 1099 - RNA, 23 nt, synthetic construct
  source 1..23: mol_type = other RNA
cctacaggacagcaggaagaaga

SEQ ID NO: 1100 - RNA, 23 nt, synthetic construct
  source 1..23: mol_type = other RNA
ggtcctacaggacagcaggaaga

SEQ ID NO: 1101 - RNA, 23 nt, synthetic construct
  source 1..23: mol_type = other RNA
gcctgtgaaatgagatgaaaaga

SEQ ID NO: 1102 - RNA, 23 nt, synthetic construct
  source 1..23: mol_type = other RNA
tctaaattggcaatatgacaagg

SEQ ID NO: 1103 - RNA, 23 nt, synthetic construct
  source 1..23: mol_type = other RNA
gcctgtgtgcaatagtcaaaagc

SEQ ID NO: 1104 - RNA, 23 nt, synthetic construct
  source 1..23: mol_type = other RNA
ccacctgggaggaaaaggagaga

SEQ ID NO: 1105 - RNA, 23 nt, synthetic construct
  source 1..23: mol_type = other RNA
acagacctgtgaaggaaatgggc

SEQ ID NO: 1106 - RNA, 23 nt, synthetic construct
  source 1..23: mol_type = other RNA
tacctcatgagtatgaaactggt

SEQ ID NO: 1107 - RNA, 23 nt, synthetic construct
  source 1..23: mol_type = other RNA
ttacctcatgagtatgaaactgg

SEQ ID NO: 1108 - RNA, 23 nt, synthetic construct
  source 1..23: mol_type = other RNA
taccttatgttgttgtacttggc

SEQ ID NO: 1109 - RNA, 23 nt, synthetic construct
  source 1..23: mol_type = other RNA
ctaccttatgttgttgtacttgg

SEQ ID NO: 1110 - RNA, 23 nt, synthetic construct
  source 1..23: mol_type = other RNA
accttaagttgttcttccaaagc

SEQ ID NO: 1111 - RNA, 23 nt, synthetic construct
  source 1..23: mol_type = other RNA
acacctgttcttcagtaagacgt

SEQ ID NO: 1112 - RNA, 23 nt, synthetic construct
  source 1..23: mol_type = other RNA
ttactctgcactgtttcagctgc

SEQ ID NO: 1113 - RNA, 23 nt, synthetic construct
  source 1..23: mol_type = other RNA
tttaccttcatctcttcaactgc

SEQ ID NO: 1114 - RNA, 23 nt, synthetic construct
  source 1..23: mol_type = other RNA
acttacatctagcacctcagaga

SEQ ID NO: 1115 - RNA, 23 nt, synthetic construct
  source 1..23: mol_type = other RNA
acctgtgcaacatcaatctgaga

SEQ ID NO: 1116 - RNA, 23 nt, synthetic construct
  source 1..23: mol_type = other RNA
atacctgtgcaacatcaatctga

SEQ ID NO: 1117 - RNA, 23 nt, synthetic construct
  source 1..23: mol_type = other RNA
accacacaatgatttagctgtga

SEQ ID NO: 1118 - RNA, 23 nt, synthetic construct
  source 1..23: mol_type = other RNA
ataccacacaatgatttagctgt

SEQ ID NO: 1119 - RNA, 23 nt, synthetic construct
  source 1..23: mol_type = other RNA
acctttccccaggcaacttcaga

SEQ ID NO: 1120 - RNA, 23 nt, synthetic construct
  source 1..23: mol_type = other RNA
tacctttccagtcttaattctgt

SEQ ID NO: 1121 - RNA, 23 nt, synthetic construct
  source 1..23: mol_type = other RNA
atttaccatatctttattgaagt

SEQ ID NO: 1122 - RNA, 23 nt, synthetic construct
  source 1..23: mol_type = other RNA
accttgagagcattatgttttgt

SEQ ID NO: 1123 - RNA, 23 nt, synthetic construct
  source 1..23: mol_type = other RNA
tcacaatttgtgcaaagttgagt

SEQ ID NO: 1124 - RNA, 23 nt, synthetic construct
  source 1..23: mol_type = other RNA
actcacaatttgtgcaaagttga

SEQ ID NO: 1125 - RNA, 23 nt, synthetic construct
  source 1..23: mol_type = other RNA
ttaccttcagagactcctcttgc

SEQ ID NO: 1126 - RNA, 23 nt, synthetic construct
  source 1..23: mol_type = other RNA
acttaccttaagataccatttgt

SEQ ID NO: 1127 - RNA, 23 nt, synthetic construct
  source 1..23: mol_type = other RNA
acctttatccactggagatttgt

SEQ ID NO: 1128 - RNA, 23 nt, synthetic construct
  source 1..23: mol_type = other RNA
accttcactggctgagtggctgg

SEQ ID NO: 1129 - RNA, 23 nt, synthetic construct
  source 1..23: mol_type = other RNA
attaccttcactggctgagtggc

SEQ ID NO: 1130 - RNA, 23 nt, synthetic construct
  source 1..23: mol_type = other RNA
cattaccttcactggctgagtgg

SEQ ID NO: 1131 - RNA, 23 nt, synthetic construct
  source 1..23: mol_type = other RNA
tacaggctccaatagtggtcagt

SEQ ID NO: 1132 - RNA, 23 nt, synthetic construct
  source 1..23: mol_type = other RNA
ttacttcgatccgtaatgattgt

SEQ ID NO: 1133 - RNA, 23 nt, synthetic construct
  source 1..23: mol_type = other RNA
ttacttgccattgtttcatcagc

SEQ ID NO: 1134 - RNA, 23 nt, synthetic construct
  source 1..23: mol_type = other RNA
ctaccctatgtacatcgttctgc

SEQ ID NO: 1135 - RNA, 23 nt, synthetic construct
  source 1..23: mol_type = other RNA
tacctctgggctcctggtagagt

SEQ ID NO: 1136 - RNA, 23 nt, synthetic construct
  source 1..23: mol_type = other RNA
attacctctgggctcctggtaga

SEQ ID NO: 1137 - RNA, 23 nt, synthetic construct
  source 1..23: mol_type = other RNA
gtaccttgactttctcgaggtga

SEQ ID NO: 1138 - RNA, 23 nt, synthetic construct
  source 1..23: mol_type = other RNA
cggtaccttgactttctcgaggt

SEQ ID NO: 1139 - RNA, 23 nt, synthetic construct
  source 1..23: mol_type = other RNA
acctgcagaagcttccatctggt

SEQ ID NO: 1140 - RNA, 23 nt, synthetic construct
  source 1..23: mol_type = other RNA
tacctgcagaagcttccatctgg

SEQ ID NO: 1141 - RNA, 23 nt, synthetic construct
  source 1..23: mol_type = other RNA
ttactggaaagaaagtgctgaga

SEQ ID NO: 1142 - RNA, 23 nt, synthetic construct
  source 1..23: mol_type = other RNA
acttactggaaagaaagtgctga

SEQ ID NO: 1143 - RNA, 23 nt, synthetic construct
  source 1..23: mol_type = other RNA
cgtcctgcaggcacagacacagc

SEQ ID NO: 1144 - RNA, 23 nt, synthetic construct
  source 1..23: mol_type = other RNA
tccacctgcaaatgtaagaaaga

SEQ ID NO: 1145 - RNA, 23 nt, synthetic construct
  source 1..23: mol_type = other RNA
gagccctaggacagagagacaga

SEQ ID NO: 1146 - RNA, 23 nt, synthetic construct
  source 1..23: mol_type = other RNA
gtcctggagccccaaggagcaga

SEQ ID NO: 1147 - RNA, 23 nt, synthetic construct
  source 1..23: mol_type = other RNA
cctggagggtgacacgccagggt

SEQ ID NO: 1148 - RNA, 23 nt, synthetic construct
  source 1..23: mol_type = other RNA
acctggagggtgacacgccaggg

SEQ ID NO: 1149 - RNA, 23 nt, synthetic construct
  source 1..23: mol_type = other RNA
cacctggagggtgacacgccagg

SEQ ID NO: 1150 - RNA, 23 nt, synthetic construct
  source 1..23: mol_type = other RNA
tcttctggaggaggaaagcaggt

SEQ ID NO: 1151 - RNA, 23 nt, synthetic construct
  source 1..23: mol_type = other RNA
ctcttctggaggaggaaagcagg

SEQ ID NO: 1152 - RNA, 23 nt, synthetic construct
  source 1..23: mol_type = other RNA
tctgcaaggggaggagagctggc

SEQ ID NO: 1153 - RNA, 23 nt, synthetic construct
  source 1..23: mol_type = other RNA
ctctgcaaggggaggagagctgg

SEQ ID NO: 1154 - RNA, 23 nt, synthetic construct
  source 1..23: mol_type = other RNA
ccgctctgcaaggggaggagagc

SEQ ID NO: 1155 - RNA, 23 nt, synthetic construct
  source 1..23: mol_type = other RNA
gtctggaaagcagagggagggga

SEQ ID NO: 1156 - RNA, 23 nt, synthetic construct
  source 1..23: mol_type = other RNA
tgtctggaaagcagagggagggg

SEQ ID NO: 1157 - RNA, 23 nt, synthetic construct
  source 1..23: mol_type = other RNA
atgtctggaaagcagagggaggg

SEQ ID NO: 1158 - RNA, 23 nt, synthetic construct
  source 1..23: mol_type = other RNA
gatgtctggaaagcagagggagg

SEQ ID NO: 1159 - RNA, 23 nt, synthetic construct
  source 1..23: mol_type = other RNA
ttctagacagcagcgggaagggt

SEQ ID NO: 1160 - RNA, 23 nt, synthetic construct
  source 1..23: mol_type = other RNA
gttctagacagcagcgggaaggg

SEQ ID NO: 1161 - RNA, 23 nt, synthetic construct
  source 1..23: mol_type = other RNA
agttctagacagcagcgggaagg

SEQ ID NO: 1162 - RNA, 23 nt, synthetic construct
  source 1..23: mol_type = other RNA
acctggaaggagacccagtgagc

SEQ ID NO: 1163 - RNA, 23 nt, synthetic construct
  source 1..23: mol_type = other RNA
gcacctggaaggagacccagtga

SEQ ID NO: 1164 - RNA, 23 nt, synthetic construct
  source 1..23: mol_type = other RNA
cctaagcagtgagcacaacaggt

SEQ ID NO: 1165 - RNA, 23 nt, synthetic construct
  source 1..23: mol_type = other RNA
tcctaagcagtgagcacaacagg

SEQ ID NO: 1166 - RNA, 23 nt, synthetic construct
  source 1..23: mol_type = other RNA
ccctgcaccagccagcagacagc

SEQ ID NO: 1167 - RNA, 23 nt, synthetic construct
  source 1..23: mol_type = other RNA
atctgggaggataaaggcaacgt

SEQ ID NO: 1168 - RNA, 23 nt, synthetic construct
  source 1..23: mol_type = other RNA
tctgagaggtcggaagagaaagc

SEQ ID NO: 1169 - RNA, 23 nt, synthetic construct
  source 1..23: mol_type = other RNA
gccctctgagaggtcggaagaga

SEQ ID NO: 1170 - RNA, 23 nt, synthetic construct
  source 1..23: mol_type = other RNA
tggactacaaaacaggagacggt

SEQ ID NO: 1171 - RNA, 23 nt, synthetic construct
  source 1..23: mol_type = other RNA
ttggactacaaaacaggagacgg

SEQ ID NO: 1172 - RNA, 23 nt, synthetic construct
  source 1..23: mol_type = other RNA
cggcctaggaggcagaagagaga

SEQ ID NO: 1173 - RNA, 23 nt, synthetic construct
  source 1..23: mol_type = other RNA
aactagatgaagaggagaaaaga

SEQ ID NO: 1174 - RNA, 23 nt, synthetic construct
  source 1..23: mol_type = other RNA
ccctgggggagaaaaggcagaga

SEQ ID NO: 1175 - RNA, 23 nt, synthetic construct
  source 1..23: mol_type = other RNA
taccctgggggagaaaaggcaga

SEQ ID NO: 1176 - RNA, 23 nt, synthetic construct
  source 1..23: mol_type = other RNA
tcacctttcggtcctcctcccgc

SEQ ID NO: 1177 - RNA, 23 nt, synthetic construct
  source 1..23: mol_type = other RNA
gctcacctcgtactctggctcgt

SEQ ID NO: 1178 - RNA, 23 nt, synthetic construct
  source 1..23: mol_type = other RNA
acttaccactgagaatttgccgt

SEQ ID NO: 1179 - RNA, 23 nt, synthetic construct
  source 1..23: mol_type = other RNA
cacctgcaggacctcgtagatgg

SEQ ID NO: 1180 - RNA, 23 nt, synthetic construct
  source 1..23: mol_type = other RNA
actcacctgcaggacctcgtaga

SEQ ID NO: 1181 - RNA, 23 nt, synthetic construct
  source 1..23: mol_type = other RNA
tttaccttctggtggctccaggc

SEQ ID NO: 1182 - RNA, 23 nt, synthetic construct
  source 1..23: mol_type = other RNA
atttaccttctggtggctccagg

SEQ ID NO: 1183 - RNA, 23 nt, synthetic construct
  source 1..23: mol_type = other RNA
actcacaaattcctggtcgtggt

SEQ ID NO: 1184 - RNA, 23 nt, synthetic construct
  source 1..23: mol_type = other RNA
acctgtagcgattccatcaaaga

SEQ ID NO: 1185 - RNA, 23 nt, synthetic construct
  source 1..23: mol_type = other RNA
tacatgcttctgtgtgacgctgc

SEQ ID NO: 1186 - RNA, 23 nt, synthetic construct
  source 1..23: mol_type = other RNA
acatacatgcttctgtgtgacgc

SEQ ID NO: 1187 - RNA, 23 nt, synthetic construct
  source 1..23: mol_type = other RNA
ctaccgtagaggcccttgcgagc

SEQ ID NO: 1188 - RNA, 23 nt, synthetic construct
  source 1..23: mol_type = other RNA
acctaccgtagaggcccttgcga

SEQ ID NO: 1189 - RNA, 23 nt, synthetic construct
  source 1..23: mol_type = other RNA
tacctcgagaaatcgcgagatgt

SEQ ID NO: 1190 - RNA, 23 nt, synthetic construct
  source 1..23: mol_type = other RNA
ctatacctcgagaaatcgcgaga

SEQ ID NO: 1191 - RNA, 23 nt, synthetic construct
  source 1..23: mol_type = other RNA
caacctgttcataccgggaaggt

SEQ ID NO: 1192 - RNA, 23 nt, synthetic construct
  source 1..23: mol_type = other RNA
ccaacctgttcataccgggaagg

SEQ ID NO: 1193 - RNA, 23 nt, synthetic construct
  source 1..23: mol_type = other RNA
tgaccttggctatcctgccatgc

SEQ ID NO: 1194 - RNA, 23 nt, synthetic construct
  source 1..23: mol_type = other RNA
ggctgcagaaggagagaagaggt

SEQ ID NO: 1195 - RNA, 23 nt, synthetic construct
  source 1..23: mol_type = other RNA
aggctgcagaaggagagaagagg

SEQ ID NO: 1196 - RNA, 23 nt, synthetic construct
  source 1..23: mol_type = other RNA
tcaggctgcagaaggagagaaga

SEQ ID NO: 1197 - RNA, 23 nt, synthetic construct
  source 1..23: mol_type = other RNA
ggcctgaatcacagggttgcagc

SEQ ID NO: 1198 - RNA, 23 nt, synthetic construct
  source 1..23: mol_type = other RNA
tctaagataggaggagaaggagg

SEQ ID NO: 1199 - RNA, 23 nt, synthetic construct
  source 1..23: mol_type = other RNA
aatctaagataggaggagaagga

SEQ ID NO: 1200 - RNA, 23 nt, synthetic construct
  source 1..23: mol_type = other RNA
caatctaagataggaggagaagg

SEQ ID NO: 1201 - RNA, 23 nt, synthetic construct
  source 1..23: mol_type = other RNA
tctctgtggccggcagggagagg

SEQ ID NO: 1202 - RNA, 23 nt, synthetic construct
  source 1..23: mol_type = other RNA
ctctgtggccggcagggagagga

SEQ ID NO: 1203 - RNA, 23 nt, synthetic construct
  source 1..23: mol_type = other RNA
catctctgtggccggcagggaga

SEQ ID NO: 1204 - RNA, 23 nt, synthetic construct
  source 1..23: mol_type = other RNA
tctgcagagaagatgggatcggg

SEQ ID NO: 1205 - RNA, 23 nt, synthetic construct
  source 1..23: mol_type = other RNA
ttctgcagagaagatgggatcgg

SEQ ID NO: 1206 - RNA, 23 nt, synthetic construct
  source 1..23: mol_type = other RNA
actacgggtggaaaacagcctgg

SEQ ID NO: 1207 - RNA, 23 nt, synthetic construct
  source 1..23: mol_type = other RNA
ccatactacgggtggaaaacagc

SEQ ID NO: 1208 - RNA, 23 nt, synthetic construct
  source 1..23: mol_type = other RNA
cctgggaagggaagaagatgggg

SEQ ID NO: 1209 - RNA, 23 nt, synthetic construct
  source 1..23: mol_type = other RNA
gcctgggaagggaagaagatggg

SEQ ID NO: 1210 - RNA, 23 nt, synthetic construct
  source 1..23: mol_type = other RNA
ggcctgggaagggaagaagatgg

SEQ ID NO: 1211 - RNA, 23 nt, synthetic construct
  source 1..23: mol_type = other RNA
gtacctgtagggtgggcggtgga

SEQ ID NO: 1212 - RNA, 23 nt, synthetic construct
  source 1..23: mol_type = other RNA
ggtacctgtagggtgggcggtgg

SEQ ID NO: 1213 - RNA, 23 nt, synthetic construct
  source 1..23: mol_type = other RNA
cctgggggagggaaacaaggaga

SEQ ID NO: 1214 - RNA, 23 nt, synthetic construct
  source 1..23: mol_type = other RNA
ttcctgggggagggaaacaagga

SEQ ID NO: 1215 - RNA, 23 nt, synthetic construct
  source 1..23: mol_type = other RNA
attcctgggggagggaaacaagg

SEQ ID NO: 1216 - RNA, 23 nt, synthetic construct
  source 1..23: mol_type = other RNA
tctgtttcagagcaaagctgagg

SEQ ID NO: 1217 - RNA, 23 nt, synthetic construct
  source 1..23: mol_type = other RNA
aatctgtttcagagcaaagctga

SEQ ID NO: 1218 - RNA, 23 nt, synthetic construct
  source 1..23: mol_type = other RNA
ctcctaggcgggagacagggggc

SEQ ID NO: 1219 - RNA, 23 nt, synthetic construct
  source 1..23: mol_type = other RNA
gctcctaggcgggagacaggggg

SEQ ID NO: 1220 - RNA, 23 nt, synthetic construct
  source 1..23: mol_type = other RNA
agctcctaggcgggagacagggg

SEQ ID NO: 1221 - RNA, 23 nt, synthetic construct
  source 1..23: mol_type = other RNA
cctgtggcgggaaagagaggaga

SEQ ID NO: 1222 - RNA, 23 nt, synthetic construct
  source 1..23: mol_type = other RNA
accctgtggcgggaaagagagga

SEQ ID NO: 1223 - RNA, 23 nt, synthetic construct
  source 1..23: mol_type = other RNA
aaccctgtggcgggaaagagagg

SEQ ID NO: 1224 - RNA, 23 nt, synthetic construct
  source 1..23: mol_type = other RNA
tacctttgcccctttgtcactgt

SEQ ID NO: 1225 - RNA, 23 nt, synthetic construct
  source 1..23: mol_type = other RNA
cacctttgttccaggggttgagc

SEQ ID NO: 1226 - RNA, 23 nt, synthetic construct
  source 1..23: mol_type = other RNA
ctcacctttgttccaggggttga

SEQ ID NO: 1227 - RNA, 23 nt, synthetic construct
  source 1..23: mol_type = other RNA
tcacagtttaggaagtagggggt

SEQ ID NO: 1228 - RNA, 23 nt, synthetic construct
  source 1..23: mol_type = other RNA
ctcacagtttaggaagtaggggg

SEQ ID NO: 1229 - RNA, 23 nt, synthetic construct
  source 1..23: mol_type = other RNA
actcacagtttaggaagtagggg

SEQ ID NO: 1230 - RNA, 23 nt, synthetic construct
  source 1..23: mol_type = other RNA
accgctgtgatgatgtcttcggt

SEQ ID NO: 1231 - RNA, 23 nt, synthetic construct
  source 1..23: mol_type = other RNA
aaccgctgtgatgatgtcttcgg

SEQ ID NO: 1232 - RNA, 23 nt, synthetic construct
  source 1..23: mol_type = other RNA
cctcacctccagggcatcaatgt

SEQ ID NO: 1233 - RNA, 23 nt, synthetic construct
  source 1..23: mol_type = other RNA
tacctggtggttgtggcgctgga

SEQ ID NO: 1234 - RNA, 23 nt, synthetic construct
  source 1..23: mol_type = other RNA
gtacctggtggttgtggcgctgg

SEQ ID NO: 1235 - RNA, 23 nt, synthetic construct
  source 1..23: mol_type = other RNA
tcctgaatgggaagaaaagaggt

SEQ ID NO: 1236 - RNA, 23 nt, synthetic construct
  source 1..23: mol_type = other RNA
ttcctgaatgggaagaaaagagg

SEQ ID NO: 1237 - RNA, 23 nt, synthetic construct
  source 1..23: mol_type = other RNA
tgttcctgaatgggaagaaaaga

SEQ ID NO: 1238 - RNA, 23 nt, synthetic construct
  source 1..23: mol_type = other RNA
cctgtgaactcacagagagaaga

SEQ ID NO: 1239 - RNA, 23 nt, synthetic construct
  source 1..23: mol_type = other RNA
caacctgtgaactcacagagaga

SEQ ID NO: 1240 - RNA, 23 nt, synthetic construct
  source 1..23: mol_type = other RNA
acctagatgaaatgaacagtaga

SEQ ID NO: 1241 - RNA, 23 nt, synthetic construct
  source 1..23: mol_type = other RNA
tacacctagatgaaatgaacagt

SEQ ID NO: 1242 - RNA, 23 nt, synthetic construct
  source 1..23: mol_type = other RNA
gactgaaaagagagcgttgacgc

SEQ ID NO: 1243 - RNA, 23 nt, synthetic construct
  source 1..23: mol_type = other RNA
gcagactgaaaagagagcgttga

SEQ ID NO: 1244 - RNA, 23 nt, synthetic construct
  source 1..23: mol_type = other RNA
ctcaccggtactctgccttgtga

SEQ ID NO: 1245 - RNA, 23 nt, synthetic construct
  source 1..23: mol_type = other RNA
accaatttctgaaagggcacagg

SEQ ID NO: 1246 - RNA, 23 nt, synthetic construct
  source 1..23: mol_type = other RNA
attaccaggtaaagttcttttgc

SEQ ID NO: 1247 - RNA, 23 nt, synthetic construct
  source 1..23: mol_type = other RNA
ctcaccagagttgtccccagtgt

SEQ ID NO: 1248 - RNA, 23 nt, synthetic construct
  source 1..23: mol_type = other RNA
tacccatcaaagcagtgggcagc

SEQ ID NO: 1249 - RNA, 23 nt, synthetic construct
  source 1..23: mol_type = other RNA
acttacccatcaaagcagtgggc

SEQ ID NO: 1250 - RNA, 23 nt, synthetic construct
  source 1..23: mol_type = other RNA
ataccagtgtaattcaaaggagc

SEQ ID NO: 1251 - RNA, 23 nt, synthetic construct
  source 1..23: mol_type = other RNA
acataccagtgtaattcaaagga

SEQ ID NO: 1252 - RNA, 23 nt, synthetic construct
  source 1..23: mol_type = other RNA
cttacctttctccttcgagaagc

SEQ ID NO: 1253 - RNA, 23 nt, synthetic construct
  source 1..23: mol_type = other RNA
atcctggccccatgcaaggagga

SEQ ID NO: 1254 - RNA, 23 nt, synthetic construct
  source 1..23: mol_type = other RNA
gatcctggccccatgcaaggagg

SEQ ID NO: 1255 - RNA, 23 nt, synthetic construct
  source 1..23: mol_type = other RNA
cctgcagaagccagagaggccgg

SEQ ID NO: 1256 - RNA, 23 nt, synthetic construct
  source 1..23: mol_type = other RNA
aggcctgcagaagccagagaggc

SEQ ID NO: 1257 - RNA, 23 nt, synthetic construct
  source 1..23: mol_type = other RNA
aaggcctgcagaagccagagagg

SEQ ID NO: 1258 - RNA, 23 nt, synthetic construct
  source 1..23: mol_type = other RNA
tctttccaaggcgacatttgtgg

SEQ ID NO: 1259 - RNA, 23 nt, synthetic construct
  source 1..23: mol_type = other RNA
cgtctttccaaggcgacatttgt

SEQ ID NO: 1260 - RNA, 23 nt, synthetic construct
  source 1..23: mol_type = other RNA
ggcctgctcgacgaacacaagga

SEQ ID NO: 1261 - RNA, 23 nt, synthetic construct
  source 1..23: mol_type = other RNA
tggcctgctcgacgaacacaagg

SEQ ID NO: 1262 - RNA, 23 nt, synthetic construct
  source 1..23: mol_type = other RNA
cctgggaggaacaaagccaaggt

SEQ ID NO: 1263 - RNA, 23 nt, synthetic construct
  source 1..23: mol_type = other RNA
gcctgggaggaacaaagccaagg

SEQ ID NO: 1264 - RNA, 23 nt, synthetic construct
  source 1..23: mol_type = other RNA
cctggaaaggtgaggaggtgggt

SEQ ID NO: 1265 - RNA, 23 nt, synthetic construct
  source 1..23: mol_type = other RNA
acctggaaaggtgaggaggtggg

SEQ ID NO: 1266 - RNA, 23 nt, synthetic construct
  source 1..23: mol_type = other RNA
gacctggaaaggtgaggaggtgg

SEQ ID NO: 1267 - RNA, 23 nt, synthetic construct
  source 1..23: mol_type = other RNA
atgacctggaaaggtgaggaggt

SEQ ID NO: 1268 - RNA, 23 nt, synthetic construct
  source 1..23: mol_type = other RNA
cctggtgcaggggtgaatggtga

SEQ ID NO: 1269 - RNA, 23 nt, synthetic construct
  source 1..23: mol_type = other RNA
tgcctggtgcaggggtgaatggt

SEQ ID NO: 1270 - RNA, 23 nt, synthetic construct
  source 1..23: mol_type = other RNA
atgcctggtgcaggggtgaatgg

SEQ ID NO: 1271 - RNA, 23 nt, synthetic construct
  source 1..23: mol_type = other RNA
tgggccttagagtcaaagacgga

SEQ ID NO: 1272 - RNA, 23 nt, synthetic construct
  source 1..23: mol_type = other RNA
gcctggggcagaggaaagccagc

SEQ ID NO: 1273 - RNA, 23 nt, synthetic construct
  source 1..23: mol_type = other RNA
cctgccagagcccgaggaaaaga

SEQ ID NO: 1274 - RNA, 23 nt, synthetic construct
  source 1..23: mol_type = other RNA
accttggcgcagcggtggaaggt

SEQ ID NO: 1275 - RNA, 23 nt, synthetic construct
  source 1..23: mol_type = other RNA
caccttggcgcagcggtggaagg

SEQ ID NO: 1276 - RNA, 23 nt, synthetic construct
  source 1..23: mol_type = other RNA
ccgcaccttggcgcagcggtgga

SEQ ID NO: 1277 - RNA, 23 nt, synthetic construct
  source 1..23: mol_type = other RNA
gctcaccagctccagcaggtcgc

SEQ ID NO: 1278 - RNA, 23 nt, synthetic construct
  source 1..23: mol_type = other RNA
cttacctgtctgtggaagcgggt

SEQ ID NO: 1279 - RNA, 23 nt, synthetic construct
  source 1..23: mol_type = other RNA
gcttacctgtctgtggaagcggg

SEQ ID NO: 1280 - RNA, 23 nt, synthetic construct
  source 1..23: mol_type = other RNA
acctcgggagctgaggctgggga

SEQ ID NO: 1281 - RNA, 23 nt, synthetic construct
  source 1..23: mol_type = other RNA
tacctcgggagctgaggctgggg

SEQ ID NO: 1282 - RNA, 23 nt, synthetic construct
  source 1..23: mol_type = other RNA
ctacctcgggagctgaggctggg

SEQ ID NO: 1283 - RNA, 23 nt, synthetic construct
  source 1..23: mol_type = other RNA
cctacctcgggagctgaggctgg

SEQ ID NO: 1284 - RNA, 23 nt, synthetic construct
  source 1..23: mol_type = other RNA
ttaccagccacgtgggcagcagc

SEQ ID NO: 1285 - RNA, 23 nt, synthetic construct
  source 1..23: mol_type = other RNA
acctgccccatgggtgctggggg

SEQ ID NO: 1286 - RNA, 23 nt, synthetic construct
  source 1..23: mol_type = other RNA
tacctgccccatgggtgctgggg

SEQ ID NO: 1287 - RNA, 23 nt, synthetic construct
  source 1..23: mol_type = other RNA
ttacctgccccatgggtgctggg

SEQ ID NO: 1288 - RNA, 23 nt, synthetic construct
  source 1..23: mol_type = other RNA
cttacctgccccatgggtgctgg

SEQ ID NO: 1289 - RNA, 23 nt, synthetic construct
  source 1..23: mol_type = other RNA
tcacctccatgcgctcgccccgc

SEQ ID NO: 1290 - RNA, 23 nt, synthetic construct
  source 1..23: mol_type = other RNA
tacctgtgaggacgtggccctgt

SEQ ID NO: 1291 - RNA, 23 nt, synthetic construct
  source 1..23: mol_type = other RNA
cacctgctcctgaggggccggga

SEQ ID NO: 1292 - RNA, 23 nt, synthetic construct
  source 1..23: mol_type = other RNA
tcacctgctcctgaggggccggg

SEQ ID NO: 1293 - RNA, 23 nt, synthetic construct
  source 1..23: mol_type = other RNA
ttcacctgctcctgaggggccgg

SEQ ID NO: 1294 - RNA, 23 nt, synthetic construct
  source 1..23: mol_type = other RNA
gtctgagagatggagagaggtga

SEQ ID NO: 1295 - RNA, 23 nt, synthetic construct
  source 1..23: mol_type = other RNA
gagtctgagagatggagagaggt

SEQ ID NO: 1296 - RNA, 23 nt, synthetic construct
  source 1..23: mol_type = other RNA
ggagtctgagagatggagagagg

SEQ ID NO: 1297 - RNA, 23 nt, synthetic construct
  source 1..23: mol_type = other RNA
tctctctggaagggcacaaaggt

SEQ ID NO: 1298 - RNA, 23 nt, synthetic construct
  source 1..23: mol_type = other RNA
cctgcagagaaacacacttgggg

SEQ ID NO: 1299 - RNA, 23 nt, synthetic construct
  source 1..23: mol_type = other RNA
ccctgcagagaaacacacttggg

SEQ ID NO: 1300 - RNA, 23 nt, synthetic construct
  source 1..23: mol_type = other RNA
tccctgcagagaaacacacttgg

SEQ ID NO: 1301 - RNA, 23 nt, synthetic construct
  source 1..23: mol_type = other RNA
ttctttgaggagaaagggagagg

SEQ ID NO: 1302 - RNA, 23 nt, synthetic construct
  source 1..23: mol_type = other RNA
ccttctttgaggagaaagggaga

SEQ ID NO: 1303 - RNA, 23 nt, synthetic construct
  source 1..23: mol_type = other RNA
tacctaagaaccatcctggccgc

SEQ ID NO: 1304 - RNA, 23 nt, synthetic construct
  source 1..23: mol_type = other RNA
acctacctaagaaccatcctggc

SEQ ID NO: 1305 - RNA, 23 nt, synthetic construct
  source 1..23: mol_type = other RNA
gcacctgtcaccctgagctctgc

SEQ ID NO: 1306 - RNA, 23 nt, synthetic construct
  source 1..23: mol_type = other RNA
acctcgtgcggcccgggagcaga

SEQ ID NO: 1307 - RNA, 23 nt, synthetic construct
  source 1..23: mol_type = other RNA
gttacctcgtgcggcccgggagc

SEQ ID NO: 1308 - RNA, 23 nt, synthetic construct
  source 1..23: mol_type = other RNA
tcaccaggggctggccggtgcgc

SEQ ID NO: 1309 - RNA, 23 nt, synthetic construct
  source 1..23: mol_type = other RNA
actcaccaggggctggccggtgc

SEQ ID NO: 1310 - RNA, 23 nt, synthetic construct
  source 1..23: mol_type = other RNA
agcctggaagagaaaggaaaggc

SEQ ID NO: 1311 - RNA, 23 nt, synthetic construct
  source 1..23: mol_type = other RNA
cagcctggaagagaaaggaaagg

SEQ ID NO: 1312 - RNA, 23 nt, synthetic construct
  source 1..23: mol_type = other RNA
tctgtccaaaagagaagacaggc

SEQ ID NO: 1313 - RNA, 23 nt, synthetic construct
  source 1..23: mol_type = other RNA
atctgtccaaaagagaagacagg

SEQ ID NO: 1314 - RNA, 23 nt, synthetic construct
  source 1..23: mol_type = other RNA
gtgctgaaataaagaaaaagggg

SEQ ID NO: 1315 - RNA, 23 nt, synthetic construct
  source 1..23: mol_type = other RNA
tgtgctgaaataaagaaaaaggg

SEQ ID NO: 1316 - RNA, 23 nt, synthetic construct
  source 1..23: mol_type = other RNA
ttgtgctgaaataaagaaaaagg

SEQ ID NO: 1317 - RNA, 23 nt, synthetic construct
  source 1..23: mol_type = other RNA
acctgggaagaagccacatgtgt

SEQ ID NO: 1318 - RNA, 23 nt, synthetic construct
  source 1..23: mol_type = other RNA
ggacctgggaagaagccacatgt

SEQ ID NO: 1319 - RNA, 23 nt, synthetic construct
  source 1..23: mol_type = other RNA
acctacagtgtaggggagagaga

SEQ ID NO: 1320 - RNA, 23 nt, synthetic construct
  source 1..23: mol_type = other RNA
agacctacagtgtaggggagaga

SEQ ID NO: 1321 - RNA, 23 nt, synthetic construct
  source 1..23: mol_type = other RNA
ttaccaaggtcgtacccacacgt

SEQ ID NO: 1322 - RNA, 23 nt, synthetic construct
  source 1..23: mol_type = other RNA
cttacctcttcactgttggtggc

SEQ ID NO: 1323 - RNA, 23 nt, synthetic construct
  source 1..23: mol_type = other RNA
gcttacctcttcactgttggtgg

SEQ ID NO: 1324 - RNA, 23 nt, synthetic construct
  source 1..23: mol_type = other RNA
tactgagattcatcattgtcagc

SEQ ID NO: 1325 - RNA, 23 nt, synthetic construct
  source 1..23: mol_type = other RNA
taccttcagattggagagctggc

SEQ ID NO: 1326 - RNA, 23 nt, synthetic construct
  source 1..23: mol_type = other RNA
ctaccttcagattggagagctgg

SEQ ID NO: 1327 - RNA, 23 nt, synthetic construct
  source 1..23: mol_type = other RNA
cctagagtgaagagattcattgg

SEQ ID NO: 1328 - RNA, 23 nt, synthetic construct
  source 1..23: mol_type = other RNA
tctgatggggaaacaaaacaagg

SEQ ID NO: 1329 - RNA, 23 nt, synthetic construct
  source 1..23: mol_type = other RNA
cacccgacttctgaacgtgcggt

SEQ ID NO: 1330 - RNA, 23 nt, synthetic construct
  source 1..23: mol_type = other RNA
tcacccgacttctgaacgtgcgg

SEQ ID NO: 1331 - RNA, 23 nt, synthetic construct
  source 1..23: mol_type = other RNA
actcacccgacttctgaacgtgc

SEQ ID NO: 1332 - RNA, 23 nt, synthetic construct
  source 1..23: mol_type = other RNA
ttactatgtctcagtggatgggc

SEQ ID NO: 1333 - RNA, 23 nt, synthetic construct
  source 1..23: mol_type = other RNA
tttactatgtctcagtggatggg

SEQ ID NO: 1334 - RNA, 23 nt, synthetic construct
  source 1..23: mol_type = other RNA
ctttactatgtctcagtggatgg

SEQ ID NO: 1335 - RNA, 23 nt, synthetic construct
  source 1..23: mol_type = other RNA
accttctgagaagatgatgttgt

SEQ ID NO: 1336 - RNA, 23 nt, synthetic construct
  source 1..23: mol_type = other RNA
ctcaccttctgagaagatgatgt

SEQ ID NO: 1337 - RNA, 23 nt, synthetic construct
  source 1..23: mol_type = other RNA
tacctgcccactgttagccaggt

SEQ ID NO: 1338 - RNA, 23 nt, synthetic construct
  source 1..23: mol_type = other RNA
ttacctgcccactgttagccagg

SEQ ID NO: 1339 - RNA, 23 nt, synthetic construct
  source 1..23: mol_type = other RNA
tacctcccactgcattacagcga

SEQ ID NO: 1340 - RNA, 23 nt, synthetic construct
  source 1..23: mol_type = other RNA
cctacctcccactgcattacagc

SEQ ID NO: 1341 - RNA, 23 nt, synthetic construct
  source 1..23: mol_type = other RNA
tacctggtggttgagccagaagc

SEQ ID NO: 1342 - RNA, 23 nt, synthetic construct
  source 1..23: mol_type = other RNA
ccttacctggtggttgagccaga

SEQ ID NO: 1343 - RNA, 23 nt, synthetic construct
  source 1..23: mol_type = other RNA
acctgggctggggaagaaggtgt

SEQ ID NO: 1344 - RNA, 23 nt, synthetic construct
  source 1..23: mol_type = other RNA
ttacctgggctggggaagaaggt

SEQ ID NO: 1345 - RNA, 23 nt, synthetic construct
  source 1..23: mol_type = other RNA
cttacctgggctggggaagaagg

SEQ ID NO: 1346 - RNA, 23 nt, synthetic construct
  source 1..23: mol_type = other RNA
ccctgggtgtagagaagacacgt

SEQ ID NO: 1347 - RNA, 23 nt, synthetic construct
  source 1..23: mol_type = other RNA
cctataaggtgtgaaagtctgga

SEQ ID NO: 1348 - RNA, 23 nt, synthetic construct
  source 1..23: mol_type = other RNA
tcctataaggtgtgaaagtctgg

SEQ ID NO: 1349 - RNA, 23 nt, synthetic construct
  source 1..23: mol_type = other RNA
acctatgagagaagacagacaga

SEQ ID NO: 1350 - RNA, 23 nt, synthetic construct
  source 1..23: mol_type = other RNA
ctcaccgtagggccagcctcaga

SEQ ID NO: 1351 - RNA, 23 nt, synthetic construct
  source 1..23: mol_type = other RNA
actcacctctgcatgctcatgga

SEQ ID NO: 1352 - RNA, 23 nt, synthetic construct
  source 1..23: mol_type = other RNA
accactgaggacagaaagagagc

SEQ ID NO: 1353 - RNA, 23 nt, synthetic construct
  source 1..23: mol_type = other RNA
caccactgcatgagaggcgatga

SEQ ID NO: 1354 - RNA, 23 nt, synthetic construct
  source 1..23: mol_type = other RNA
aatctggaaaggaaggaagcaga

SEQ ID NO: 1355 - RNA, 23 nt, synthetic construct
  source 1..23: mol_type = other RNA
tctgcaatgggtagggagagaga

SEQ ID NO: 1356 - RNA, 23 nt, synthetic construct
  source 1..23: mol_type = other RNA
ggtctgcaatgggtagggagaga

SEQ ID NO: 1357 - RNA, 23 nt, synthetic construct
  source 1..23: mol_type = other RNA
ttggtctgcaatgggtagggaga

SEQ ID NO: 1358 - RNA, 23 nt, synthetic construct
  source 1..23: mol_type = other RNA
taccttggcatggtggaggtaga

SEQ ID NO: 1359 - RNA, 23 nt, synthetic construct
  source 1..23: mol_type = other RNA
gcttaccttggcatggtggaggt

SEQ ID NO: 1360 - RNA, 23 nt, synthetic construct
  source 1..23: mol_type = other RNA
actcaccttcgtgatgattctgc

SEQ ID NO: 1361 - RNA, 23 nt, synthetic construct
  source 1..23: mol_type = other RNA
cccacctgcatggtgatgttgga

SEQ ID NO: 1362 - RNA, 23 nt, synthetic construct
  source 1..23: mol_type = other RNA
gcccacctgcatggtgatgttgg

SEQ ID NO: 1363 - RNA, 23 nt, synthetic construct
  source 1..23: mol_type = other RNA
acctgcattcacatttgttgtgc

SEQ ID NO: 1364 - RNA, 23 nt, synthetic construct
  source 1..23: mol_type = other RNA
tcacctgcattcacatttgttgt

SEQ ID NO: 1365 - RNA, 23 nt, synthetic construct
  source 1..23: mol_type = other RNA
ggatttcagggaagatgaagggc

SEQ ID NO: 1366 - RNA, 23 nt, synthetic construct
  source 1..23: mol_type = other RNA
tggatttcagggaagatgaaggg

SEQ ID NO: 1367 - RNA, 23 nt, synthetic construct
  source 1..23: mol_type = other RNA
ctggatttcagggaagatgaagg

SEQ ID NO: 1368 - RNA, 23 nt, synthetic construct
  source 1..23: mol_type = other RNA
tctccccaggaccatccacctga

SEQ ID NO: 1369 - RNA, 23 nt, synthetic construct
  source 1..23: mol_type = other RNA
ctgctttgcaggtgctgaacagc

SEQ ID NO: 1370 - RNA, 23 nt, synthetic construct
  source 1..23: mol_type = other RNA
ctccccggtaggagcctcccggt

SEQ ID NO: 1371 - RNA, 23 nt, synthetic construct
  source 1..23: mol_type = other RNA
tctccccggtaggagcctcccgg

SEQ ID NO: 1372 - RNA, 23 nt, synthetic construct
  source 1..23: mol_type = other RNA
gggaggtatgtgtgagcctgtgt

SEQ ID NO: 1373 - RNA, 23 nt, synthetic construct
  source 1..23: mol_type = other RNA
gggggaggtatgtgtgagcctgt

SEQ ID NO: 1374 - RNA, 23 nt, synthetic construct
  source 1..23: mol_type = other RNA
tttatcagctcagaaggactagt

SEQ ID NO: 1375 - RNA, 23 nt, synthetic construct
  source 1..23: mol_type = other RNA
ttctaggcattcctgctgaatgt

SEQ ID NO: 1376 - RNA, 23 nt, synthetic construct
  source 1..23: mol_type = other RNA
ttgattctaggcattcctgctga

SEQ ID NO: 1377 - RNA, 23 nt, synthetic construct
  source 1..23: mol_type = other RNA
attatattcaggtagtccatgga

SEQ ID NO: 1378 - RNA, 23 nt, synthetic construct
  source 1..23: mol_type = other RNA
tcctttaggaggctggtggtggc

SEQ ID NO: 1379 - RNA, 23 nt, synthetic construct
  source 1..23: mol_type = other RNA
ctcctttaggaggctggtggtgg

SEQ ID NO: 1380 - RNA, 23 nt, synthetic construct
  source 1..23: mol_type = other RNA
atctcctttaggaggctggtggt

SEQ ID NO: 1381 - RNA, 23 nt, synthetic construct
  source 1..23: mol_type = other RNA
ttaaagtaagtagaaaataaaga

SEQ ID NO: 1382 - RNA, 23 nt, synthetic construct
  source 1..23: mol_type = other RNA
tgatggtaagacactttggtggg

SEQ ID NO: 1383 - RNA, 23 nt, synthetic construct
  source 1..23: mol_type = other RNA
atgatggtaagacactttggtgg

SEQ ID NO: 1384 - RNA, 23 nt, synthetic construct
  source 1..23: mol_type = other RNA
acatgatggtaagacactttggt

SEQ ID NO: 1385 - RNA, 23 nt, synthetic construct
  source 1..23: mol_type = other RNA
aacatgatggtaagacactttgg

SEQ ID NO: 1386 - RNA, 23 nt, synthetic construct
  source 1..23: mol_type = other RNA
atcaggtaaaacctgtctaagga

SEQ ID NO: 1387 - RNA, 23 nt, synthetic construct
  source 1..23: mol_type = other RNA
tatcaggtaaaacctgtctaagg

SEQ ID NO: 1388 - RNA, 23 nt, synthetic construct
  source 1..23: mol_type = other RNA
tcctcaggagcttcagaggccga

SEQ ID NO: 1389 - RNA, 23 nt, synthetic construct
  source 1..23: mol_type = other RNA
ctttcctcaggagcttcagaggc

SEQ ID NO: 1390 - RNA, 23 nt, synthetic construct
  source 1..23: mol_type = other RNA
tctttcctcaggagcttcagagg

SEQ ID NO: 1391 - RNA, 23 nt, synthetic construct
  source 1..23: mol_type = other RNA
tgatttaggggctgggtgaccga

SEQ ID NO: 1392 - RNA, 23 nt, synthetic construct
  source 1..23: mol_type = other RNA
ctgcccgtaagcacttggtggga

SEQ ID NO: 1393 - RNA, 23 nt, synthetic construct
  source 1..23: mol_type = other RNA
tctgcccgtaagcacttggtggg

SEQ ID NO: 1394 - RNA, 23 nt, synthetic construct
  source 1..23: mol_type = other RNA
ctctgcccgtaagcacttggtgg

SEQ ID NO: 1395 - RNA, 23 nt, synthetic construct
  source 1..23: mol_type = other RNA
gcctctgcccgtaagcacttggt

SEQ ID NO: 1396 - RNA, 23 nt, synthetic construct
  source 1..23: mol_type = other RNA
gcaggccaggtacacccgctggc

SEQ ID NO: 1397 - RNA, 23 nt, synthetic construct
  source 1..23: mol_type = other RNA
agcaggccaggtacacccgctgg

SEQ ID NO: 1398 - RNA, 23 nt, synthetic construct
  source 1..23: mol_type = other RNA
atattcctcaggtactccaaaga

SEQ ID NO: 1399 - RNA, 23 nt, synthetic construct
  source 1..23: mol_type = other RNA
ttcatagatcgagacatgtaagc

SEQ ID NO: 1400 - RNA, 23 nt, synthetic construct
  source 1..23: mol_type = other RNA
acacaggaagccctggaagctgc

SEQ ID NO: 1401 - RNA, 23 nt, synthetic construct
  source 1..23: mol_type = other RNA
ctcacacaggaagccctggaagc

SEQ ID NO: 1402 - RNA, 23 nt, synthetic construct
  source 1..23: mol_type = other RNA
cccacaggggccctggctatgga

SEQ ID NO: 1403 - RNA, 23 nt, synthetic construct
  source 1..23: mol_type = other RNA
ccccacaggggccctggctatgg

SEQ ID NO: 1404 - RNA, 23 nt, synthetic construct
  source 1..23: mol_type = other RNA
ctcactagacttgacccacaggc

SEQ ID NO: 1405 - RNA, 23 nt, synthetic construct
  source 1..23: mol_type = other RNA
cctcactagacttgacccacagg

SEQ ID NO: 1406 - RNA, 23 nt, synthetic construct
  source 1..23: mol_type = other RNA
tcctctcctagatgttccacaga

SEQ ID NO: 1407 - RNA, 23 nt, synthetic construct
  source 1..23: mol_type = other RNA
ctgcagggaaacaagagaccaga

SEQ ID NO: 1408 - RNA, 23 nt, synthetic construct
  source 1..23: mol_type = other RNA
tttgtctgcagggaaacaagaga

SEQ ID NO: 1409 - RNA, 23 nt, synthetic construct
  source 1..23: mol_type = other RNA
catcagagtgaagacccacagga

SEQ ID NO: 1410 - RNA, 23 nt, synthetic construct
  source 1..23: mol_type = other RNA
ccatcagagtgaagacccacagg

SEQ ID NO: 1411 - RNA, 23 nt, synthetic construct
  source 1..23: mol_type = other RNA
ccataagaaacaccagaagaagt

SEQ ID NO: 1412 - RNA, 23 nt, synthetic construct
  source 1..23: mol_type = other RNA
tctccataagaaacaccagaaga

SEQ ID NO: 1413 - RNA, 23 nt, synthetic construct
  source 1..23: mol_type = other RNA
gccctgaaggtactgatccaggc

SEQ ID NO: 1414 - RNA, 23 nt, synthetic construct
  source 1..23: mol_type = other RNA
ggccctgaaggtactgatccagg

SEQ ID NO: 1415 - RNA, 23 nt, synthetic construct
  source 1..23: mol_type = other RNA
gggcaggtgagtggctgtgggga

SEQ ID NO: 1416 - RNA, 23 nt, synthetic construct
  source 1..23: mol_type = other RNA
tgggcaggtgagtggctgtgggg

SEQ ID NO: 1417 - RNA, 23 nt, synthetic construct
  source 1..23: mol_type = other RNA
gtgggcaggtgagtggctgtggg

SEQ ID NO: 1418 - RNA, 23 nt, synthetic construct
  source 1..23: mol_type = other RNA
tgtgggcaggtgagtggctgtgg

SEQ ID NO: 1419 - RNA, 23 nt, synthetic construct
  source 1..23: mol_type = other RNA
catgtgacaggtgaggcacaggc

SEQ ID NO: 1420 - RNA, 23 nt, synthetic construct
  source 1..23: mol_type = other RNA
cacctgtaagtgctgggccagga

SEQ ID NO: 1421 - RNA, 23 nt, synthetic construct
  source 1..23: mol_type = other RNA
tcacctgtaagtgctgggccagg

SEQ ID NO: 1422 - RNA, 23 nt, synthetic construct
  source 1..23: mol_type = other RNA
aacgtcacctgtaagtgctgggc

SEQ ID NO: 1423 - RNA, 23 nt, synthetic construct
  source 1..23: mol_type = other RNA
gcctccccggtgagtgatggggc

SEQ ID NO: 1424 - RNA, 23 nt, synthetic construct
  source 1..23: mol_type = other RNA
agcctccccggtgagtgatgggg

SEQ ID NO: 1425 - RNA, 23 nt, synthetic construct
  source 1..23: mol_type = other RNA
ctgcagatcacggtcagtctagc

SEQ ID NO: 1426 - RNA, 23 nt, synthetic construct
  source 1..23: mol_type = other RNA
cttctctgcagatcacggtcagt

SEQ ID NO: 1427 - RNA, 23 nt, synthetic construct
  source 1..23: mol_type = other RNA
gtgcagcatttggaagctcctga

SEQ ID NO: 1428 - RNA, 23 nt, synthetic construct
  source 1..23: mol_type = other RNA
ctttgtcaggggtacatgatgga

SEQ ID NO: 1429 - RNA, 23 nt, synthetic construct
  source 1..23: mol_type = other RNA
tctttgtcaggggtacatgatgg

SEQ ID NO: 1430 - RNA, 23 nt, synthetic construct
  source 1..23: mol_type = other RNA
atctttcaggtgcttcaagaaga

SEQ ID NO: 1431 - RNA, 23 nt, synthetic construct
  source 1..23: mol_type = other RNA
ttctccaggtattgggagatcga

SEQ ID NO: 1432 - RNA, 23 nt, synthetic construct
  source 1..23: mol_type = other RNA
ttctcacagatttcacaggctgt

SEQ ID NO: 1433 - RNA, 23 nt, synthetic construct
  source 1..23: mol_type = other RNA
tgctgtcttaggttggatgttga

SEQ ID NO: 1434 - RNA, 23 nt, synthetic construct
  source 1..23: mol_type = other RNA
atgctgcaggccatagagcgaga

SEQ ID NO: 1435 - RNA, 23 nt, synthetic construct
  source 1..23: mol_type = other RNA
tcatgctgcaggccatagagcga

SEQ ID NO: 1436 - RNA, 23 nt, synthetic construct
  source 1..23: mol_type = other RNA
tttctagagggtgttaatgcaga

SEQ ID NO: 1437 - RNA, 23 nt, synthetic construct
  source 1..23: mol_type = other RNA
ttctttctagagggtgttaatgc

SEQ ID NO: 1438 - RNA, 23 nt, synthetic construct
  source 1..23: mol_type = other RNA
ggcacaggatgaagtcaaccggc

SEQ ID NO: 1439 - RNA, 23 nt, synthetic construct
  source 1..23: mol_type = other RNA
tggcacaggatgaagtcaaccgg

SEQ ID NO: 1440 - RNA, 23 nt, synthetic construct
  source 1..23: mol_type = other RNA
tggaaggtctatgccagaaagga

SEQ ID NO: 1441 - RNA, 23 nt, synthetic construct
  source 1..23: mol_type = other RNA
gtggaaggtctatgccagaaagg

SEQ ID NO: 1442 - RNA, 23 nt, synthetic construct
  source 1..23: mol_type = other RNA
tttcagagagctaaagaagaggc

SEQ ID NO: 1443 - RNA, 23 nt, synthetic construct
  source 1..23: mol_type = other RNA
tttcttaggaagtttgggcatgt

SEQ ID NO: 1444 - RNA, 23 nt, synthetic construct
  source 1..23: mol_type = other RNA
gtttcagtcacttgaaaatttga

SEQ ID NO: 1445 - RNA, 23 nt, synthetic construct
  source 1..23: mol_type = other RNA
tcccaacagaaaatccaatctga

SEQ ID NO: 1446 - RNA, 23 nt, synthetic construct
  source 1..23: mol_type = other RNA
aaacttagaacttgtataaaagt

SEQ ID NO: 1447 - RNA, 23 nt, synthetic construct
  source 1..23: mol_type = other RNA
ttcacaggctactcaaaaagaga

SEQ ID NO: 1448 - RNA, 23 nt, synthetic construct
  source 1..23: mol_type = other RNA
ggaatatagcgtttaaaggcaga

SEQ ID NO: 1449 - RNA, 23 nt, synthetic construct
  source 1..23: mol_type = other RNA
gatcagaatgaagacaatgaggg

SEQ ID NO: 1450 - RNA, 23 nt, synthetic construct
  source 1..23: mol_type = other RNA
tgatcagaatgaagacaatgagg

SEQ ID NO: 1451 - RNA, 23 nt, synthetic construct
  source 1..23: mol_type = other RNA
tttgatcagaatgaagacaatga

SEQ ID NO: 1452 - RNA, 23 nt, synthetic construct
  source 1..23: mol_type = other RNA
gctcaataggaaattgatcggga

SEQ ID NO: 1453 - RNA, 23 nt, synthetic construct
  source 1..23: mol_type = other RNA
tgctcaataggaaattgatcggg

SEQ ID NO: 1454 - RNA, 23 nt, synthetic construct
  source 1..23: mol_type = other RNA
ttgctcaataggaaattgatcgg

SEQ ID NO: 1455 - RNA, 23 nt, synthetic construct
  source 1..23: mol_type = other RNA
taccagcacactgtccgtgaaga

SEQ ID NO: 1456 - RNA, 23 nt, synthetic construct
  source 1..23: mol_type = other RNA
ctataccagcacactgtccgtga

SEQ ID NO: 1457 - RNA, 23 nt, synthetic construct
  source 1..23: mol_type = other RNA
atctataccagcacactgtccgt

SEQ ID NO: 1458 - RNA, 23 nt, synthetic construct
  source 1..23: mol_type = other RNA
tattacagaatataaaagatagt

SEQ ID NO: 1459 - RNA, 23 nt, synthetic construct
  source 1..23: mol_type = other RNA
ttacctgcaggcgatttgacaga

SEQ ID NO: 1460 - RNA, 23 nt, synthetic construct
  source 1..23: mol_type = other RNA
tcttacaggaactccaggatggc

SEQ ID NO: 1461 - RNA, 23 nt, synthetic construct
  source 1..23: mol_type = other RNA
atcttacaggaactccaggatgg

SEQ ID NO: 1462 - RNA, 23 nt, synthetic construct
  source 1..23: mol_type = other RNA
ctccaggctagaagaacaaaaga

SEQ ID NO: 1463 - RNA, 23 nt, synthetic construct
  source 1..23: mol_type = other RNA
gtttcagttactggtggaagagt

SEQ ID NO: 1464 - RNA, 23 nt, synthetic construct
  source 1..23: mol_type = other RNA
ctgtttcagttactggtggaaga

SEQ ID NO: 1465 - RNA, 23 nt, synthetic construct
  source 1..23: mol_type = other RNA
ccccaggaaactgaaatagcagt

SEQ ID NO: 1466 - RNA, 23 nt, synthetic construct
  source 1..23: mol_type = other RNA
tttccccaggaaactgaaatagc

SEQ ID NO: 1467 - RNA, 23 nt, synthetic construct
  source 1..23: mol_type = other RNA
ctgttaaagaggaagttagaaga

SEQ ID NO: 1468 - RNA, 23 nt, synthetic construct
  source 1..23: mol_type = other RNA
ttcttacaggcaacaatgcagga

SEQ ID NO: 1469 - RNA, 23 nt, synthetic construct
  source 1..23: mol_type = other RNA
gttcttacaggcaacaatgcagg

SEQ ID NO: 1470 - RNA, 23 nt, synthetic construct
  source 1..23: mol_type = other RNA
tattctagttgaaagaattcaga

SEQ ID NO: 1471 - RNA, 23 nt, synthetic construct
  source 1..23: mol_type = other RNA
aatctatagcagttggccaaaga

SEQ ID NO: 1472 - RNA, 23 nt, synthetic construct
  source 1..23: mol_type = other RNA
ttgcagggtgagtgagcgagagg

SEQ ID NO: 1473 - RNA, 23 nt, synthetic construct
  source 1..23: mol_type = other RNA
ctttgcagggtgagtgagcgaga

SEQ ID NO: 1474 - RNA, 23 nt, synthetic construct
  source 1..23: mol_type = other RNA
tcctttgcagggtgagtgagcga

SEQ ID NO: 1475 - RNA, 23 nt, synthetic construct
  source 1..23: mol_type = other RNA
gtcctgtaggacctccaaggtga

SEQ ID NO: 1476 - RNA, 23 nt, synthetic construct
  source 1..23: mol_type = other RNA
ctgtcctgtaggacctccaaggt

SEQ ID NO: 1477 - RNA, 23 nt, synthetic construct
  source 1..23: mol_type = other RNA
atttcacaggccttcaagaggga

SEQ ID NO: 1478 - RNA, 23 nt, synthetic construct
  source 1..23: mol_type = other RNA
catttcacaggccttcaagaggg

SEQ ID NO: 1479 - RNA, 23 nt, synthetic construct
  source 1..23: mol_type = other RNA
tcatttcacaggccttcaagagg

SEQ ID NO: 1480 - RNA, 23 nt, synthetic construct
  source 1..23: mol_type = other RNA
aatttagagctgcctcctgagga

SEQ ID NO: 1481 - RNA, 23 nt, synthetic construct
  source 1..23: mol_type = other RNA
caatttagagctgcctcctgagg

SEQ ID NO: 1482 - RNA, 23 nt, synthetic construct
  source 1..23: mol_type = other RNA
gccaatttagagctgcctcctga

SEQ ID NO: 1483 - RNA, 23 nt, synthetic construct
  source 1..23: mol_type = other RNA
tgcacacaggcacttcgaggaga

SEQ ID NO: 1484 - RNA, 23 nt, synthetic construct
  source 1..23: mol_type = other RNA
attgcacacaggcacttcgagga

SEQ ID NO: 1485 - RNA, 23 nt, synthetic construct
  source 1..23: mol_type = other RNA
tcctcccaggtggccgtcgagga

SEQ ID NO: 1486 - RNA, 23 nt, synthetic construct
  source 1..23: mol_type = other RNA
ttcctcccaggtggccgtcgagg

SEQ ID NO: 1487 - RNA, 23 nt, synthetic construct
  source 1..23: mol_type = other RNA
actcatgaggtaaactaaaacgt

SEQ ID NO: 1488 - RNA, 23 nt, synthetic construct
  source 1..23: mol_type = other RNA
aaagcaagtaagtccttatttgt

SEQ ID NO: 1489 - RNA, 23 nt, synthetic construct
  source 1..23: mol_type = other RNA
cataaggtaggtgtatcttatgt

SEQ ID NO: 1490 - RNA, 23 nt, synthetic construct
  source 1..23: mol_type = other RNA
aacttaaggtcagattattttgc

SEQ ID NO: 1491 - RNA, 23 nt, synthetic construct
  source 1..23: mol_type = other RNA
gaacaggtgtgtcatgtgtgaga

SEQ ID NO: 1492 - RNA, 23 nt, synthetic construct
  source 1..23: mol_type = other RNA
aagaacaggtgtgtcatgtgtga

SEQ ID NO: 1493 - RNA, 23 nt, synthetic construct
  source 1..23: mol_type = other RNA
tgaagaacaggtgtgtcatgtgt

SEQ ID NO: 1494 - RNA, 23 nt, synthetic construct
  source 1..23: mol_type = other RNA
actggccgtatgtactttctagc

SEQ ID NO: 1495 - RNA, 23 nt, synthetic construct
  source 1..23: mol_type = other RNA
gaaaaggtgagagcatcttaagc

SEQ ID NO: 1496 - RNA, 23 nt, synthetic construct
  source 1..23: mol_type = other RNA
tgaatggtaattacacgagttga

SEQ ID NO: 1497 - RNA, 23 nt, synthetic construct
  source 1..23: mol_type = other RNA
tggtgaatggtaattacacgagt

SEQ ID NO: 1498 - RNA, 23 nt, synthetic construct
  source 1..23: mol_type = other RNA
ctacagacaagtaagtaaaaagc

SEQ ID NO: 1499 - RNA, 23 nt, synthetic construct
  source 1..23: mol_type = other RNA
attgcaggtctgtgaatatttga

SEQ ID NO: 1500 - RNA, 23 nt, synthetic construct
  source 1..23: mol_type = other RNA
tagatgtaagttgtaaattaagc

SEQ ID NO: 1501 - RNA, 23 nt, synthetic construct
  source 1..23: mol_type = other RNA
tgaagaggtatgaagataagtga

SEQ ID NO: 1502 - RNA, 23 nt, synthetic construct
  source 1..23: mol_type = other RNA
catgaagaggtatgaagataagt

SEQ ID NO: 1503 - RNA, 23 nt, synthetic construct
  source 1..23: mol_type = other RNA
gcacaggtatatgttatttcaga

SEQ ID NO: 1504 - RNA, 23 nt, synthetic construct
  source 1..23: mol_type = other RNA
attgtgtggtatgtatttctggt

SEQ ID NO: 1505 - RNA, 23 nt, synthetic construct
  source 1..23: mol_type = other RNA
cattgtgtggtatgtatttctgg

SEQ ID NO: 1506 - RNA, 23 nt, synthetic construct
  source 1..23: mol_type = other RNA
tgtgtggtatgtatttctggtgg

SEQ ID NO: 1507 - RNA, 23 nt, synthetic construct
  source 1..23: mol_type = other RNA
gcaaaggtgtgtgcatgctgaga

SEQ ID NO: 1508 - RNA, 23 nt, synthetic construct
  source 1..23: mol_type = other RNA
gagcaaaggtgtgtgcatgctga

SEQ ID NO: 1509 - RNA, 23 nt, synthetic construct
  source 1..23: mol_type = other RNA
ttaaggtagcaaataaaatatga

SEQ ID NO: 1510 - RNA, 23 nt, synthetic construct
  source 1..23: mol_type = other RNA
aagatatggtaaattggttgtga

SEQ ID NO: 1511 - RNA, 23 nt, synthetic construct
  source 1..23: mol_type = other RNA
taaagatatggtaaattggttgt

SEQ ID NO: 1512 - RNA, 23 nt, synthetic construct
  source 1..23: mol_type = other RNA
acaaattgtgagttgttactggc

SEQ ID NO: 1513 - RNA, 23 nt, synthetic construct
  source 1..23: mol_type = other RNA
cacaaattgtgagttgttactgg

SEQ ID NO: 1514 - RNA, 23 nt, synthetic construct
  source 1..23: mol_type = other RNA
gtctctgaaggtaaaaccaaagc

SEQ ID NO: 1515 - RNA, 23 nt, synthetic construct
  source 1..23: mol_type = other RNA
cttaaggtaagtctttgatttgt

SEQ ID NO: 1516 - RNA, 23 nt, synthetic construct
  source 1..23: mol_type = other RNA
ttggagcctgtaagtatactgga

SEQ ID NO: 1517 - RNA, 23 nt, synthetic construct
  source 1..23: mol_type = other RNA
attggagcctgtaagtatactgg

SEQ ID NO: 1518 - RNA, 23 nt, synthetic construct
  source 1..23: mol_type = other RNA
gcagaaggtatgagaaaaaatga

SEQ ID NO: 1519 - RNA, 23 nt, synthetic construct
  source 1..23: mol_type = other RNA
gaaaccaaggttagtatcaaaga

SEQ ID NO: 1520 - RNA, 23 nt, synthetic construct
  source 1..23: mol_type = other RNA
cattaggtaggaaaagatgtgga

SEQ ID NO: 1521 - RNA, 23 nt, synthetic construct
  source 1..23: mol_type = other RNA
acattaggtaggaaaagatgtgg

SEQ ID NO: 1522 - RNA, 23 nt, synthetic construct
  source 1..23: mol_type = other RNA
caacattaggtaggaaaagatgt

SEQ ID NO: 1523 - RNA, 23 nt, synthetic construct
  source 1..23: mol_type = other RNA
gcccagaggtaattgaatgtgga

SEQ ID NO: 1524 - RNA, 23 nt, synthetic construct
  source 1..23: mol_type = other RNA
agcccagaggtaattgaatgtgg

SEQ ID NO: 1525 - RNA, 23 nt, synthetic construct
  source 1..23: mol_type = other RNA
gcttctgcaggtaagcacattgt

SEQ ID NO: 1526 - RNA, 23 nt, synthetic construct
  source 1..23: mol_type = other RNA
ctgcaggacggagaggagcagga

SEQ ID NO: 1527 - RNA, 23 nt, synthetic construct
  source 1..23: mol_type = other RNA
cctgcaggacggagaggagcagg

SEQ ID NO: 1528 - RNA, 23 nt, synthetic construct
  source 1..23: mol_type = other RNA
gtgcctgcaggacggagaggagc

SEQ ID NO: 1529 - RNA, 23 nt, synthetic construct
  source 1..23: mol_type = other RNA
catttgcaggtggaaagcggtga

SEQ ID NO: 1530 - RNA, 23 nt, synthetic construct
  source 1..23: mol_type = other RNA
tacatttgcaggtggaaagcggt

SEQ ID NO: 1531 - RNA, 23 nt, synthetic construct
  source 1..23: mol_type = other RNA
tccacaggcaaagaacagaagga

SEQ ID NO: 1532 - RNA, 23 nt, synthetic construct
  source 1..23: mol_type = other RNA
ctccacaggcaaagaacagaagg

SEQ ID NO: 1533 - RNA, 23 nt, synthetic construct
  source 1..23: mol_type = other RNA
cctctccacaggcaaagaacaga

SEQ ID NO: 1534 - RNA, 23 nt, synthetic construct
  source 1..23: mol_type = other RNA
gtcctagggctcccggggccggc

SEQ ID NO: 1535 - RNA, 23 nt, synthetic construct
  source 1..23: mol_type = other RNA
tgtcctagggctcccggggccgg

SEQ ID NO: 1536 - RNA, 23 nt, synthetic construct
  source 1..23: mol_type = other RNA
ctctgtcctagggctcccggggc

SEQ ID NO: 1537 - RNA, 23 nt, synthetic construct
  source 1..23: mol_type = other RNA
tttccccaggctgagaagaaagc

SEQ ID NO: 1538 - RNA, 23 nt, synthetic construct
  source 1..23: mol_type = other RNA
ctccaggacggccggggctttgg

SEQ ID NO: 1539 - RNA, 23 nt, synthetic construct
  source 1..23: mol_type = other RNA
tggggctccaggacggccggggc

SEQ ID NO: 1540 - RNA, 23 nt, synthetic construct
  source 1..23: mol_type = other RNA
cccccaggtgtgtgttgagaagc

SEQ ID NO: 1541 - RNA, 23 nt, synthetic construct
  source 1..23: mol_type = other RNA
ctccaggtggccagcagccgcgc

SEQ ID NO: 1542 - RNA, 23 nt, synthetic construct
  source 1..23: mol_type = other RNA
ccctccaggtggccagcagccgc

SEQ ID NO: 1543 - RNA, 23 nt, synthetic construct
  source 1..23: mol_type = other RNA
tcaccctccaggtggccagcagc

SEQ ID NO: 1544 - RNA, 23 nt, synthetic construct
  source 1..23: mol_type = other RNA
cttgcagagcggctggtgtacga

SEQ ID NO: 1545 - RNA, 23 nt, synthetic construct
  source 1..23: mol_type = other RNA
tccccttgcagagcggctggtgt

SEQ ID NO: 1546 - RNA, 23 nt, synthetic construct
  source 1..23: mol_type = other RNA
ttccagacatctgcatctcctgt

SEQ ID NO: 1547 - RNA, 23 nt, synthetic construct
  source 1..23: mol_type = other RNA
tgtctagaactgctttctggagt

SEQ ID NO: 1548 - RNA, 23 nt, synthetic construct
  source 1..23: mol_type = other RNA
gctgtctagaactgctttctgga

SEQ ID NO: 1549 - RNA, 23 nt, synthetic construct
  source 1..23: mol_type = other RNA
tgctgtctagaactgctttctgg

SEQ ID NO: 1550 - RNA, 23 nt, synthetic construct
  source 1..23: mol_type = other RNA
actgcttaggaccctccaaaggt

SEQ ID NO: 1551 - RNA, 23 nt, synthetic construct
  source 1..23: mol_type = other RNA
cactgcttaggaccctccaaagg

SEQ ID NO: 1552 - RNA, 23 nt, synthetic construct
  source 1..23: mol_type = other RNA
tggtgcagggctcctggtgctga

SEQ ID NO: 1553 - RNA, 23 nt, synthetic construct
  source 1..23: mol_type = other RNA
ggctggtgcagggctcctggtgc

SEQ ID NO: 1554 - RNA, 23 nt, synthetic construct
  source 1..23: mol_type = other RNA
cctcccagatccaggagtggggc

SEQ ID NO: 1555 - RNA, 23 nt, synthetic construct
  source 1..23: mol_type = other RNA
tcctcccagatccaggagtgggg

SEQ ID NO: 1556 - RNA, 23 nt, synthetic construct
  source 1..23: mol_type = other RNA
atcctcccagatccaggagtggg

SEQ ID NO: 1557 - RNA, 23 nt, synthetic construct
  source 1..23: mol_type = other RNA
tatcctcccagatccaggagtgg

SEQ ID NO: 1558 - RNA, 23 nt, synthetic construct
  source 1..23: mol_type = other RNA
cctctcagagggcactggccggc

SEQ ID NO: 1559 - RNA, 23 nt, synthetic construct
  source 1..23: mol_type = other RNA
acctctcagagggcactggccgg

SEQ ID NO: 1560 - RNA, 23 nt, synthetic construct
  source 1..23: mol_type = other RNA
tttgtagtccaaccctgtgatga

SEQ ID NO: 1561 - RNA, 23 nt, synthetic construct
  source 1..23: mol_type = other RNA
catctagttcagcaaagtgagga

SEQ ID NO: 1562 - RNA, 23 nt, synthetic construct
  source 1..23: mol_type = other RNA
tcatctagttcagcaaagtgagg

SEQ ID NO: 1563 - RNA, 23 nt, synthetic construct
  source 1..23: mol_type = other RNA
cttcatctagttcagcaaagtga

SEQ ID NO: 1564 - RNA, 23 nt, synthetic construct
  source 1..23: mol_type = other RNA
gaaaggtgagcagcgggctctgc

SEQ ID NO: 1565 - RNA, 23 nt, synthetic construct
  source 1..23: mol_type = other RNA
ggaccgaaaggtgagcagcgggc

SEQ ID NO: 1566 - RNA, 23 nt, synthetic construct
  source 1..23: mol_type = other RNA
gcagaagcgggtgagtcctcagc

SEQ ID NO: 1567 - RNA, 23 nt, synthetic construct
  source 1..23: mol_type = other RNA
agggaggtgaggcgccttctggc

SEQ ID NO: 1568 - RNA, 23 nt, synthetic construct
  source 1..23: mol_type = other RNA
aagggaggtgaggcgccttctgg

SEQ ID NO: 1569 - RNA, 23 nt, synthetic construct
  source 1..23: mol_type = other RNA
cagtggtaagttgtggggtttgg

SEQ ID NO: 1570 - RNA, 23 nt, synthetic construct
  source 1..23: mol_type = other RNA
ttctcagtggtaagttgtggggt

SEQ ID NO: 1571 - RNA, 23 nt, synthetic construct
  source 1..23: mol_type = other RNA
attctcagtggtaagttgtgggg

SEQ ID NO: 1572 - RNA, 23 nt, synthetic construct
  source 1..23: mol_type = other RNA
tgcaggtgagtgtccctgctggg

SEQ ID NO: 1573 - RNA, 23 nt, synthetic construct
  source 1..23: mol_type = other RNA
ctgcaggtgagtgtccctgctgg

SEQ ID NO: 1574 - RNA, 23 nt, synthetic construct
  source 1..23: mol_type = other RNA
gtcctgcaggtgagtgtccctgc

SEQ ID NO: 1575 - RNA, 23 nt, synthetic construct
  source 1..23: mol_type = other RNA
cgcacaagaggtagttggcctgc

SEQ ID NO: 1576 - RNA, 23 nt, synthetic construct
  source 1..23: mol_type = other RNA
tgagggtaagtttgttgcctggg

SEQ ID NO: 1577 - RNA, 23 nt, synthetic construct
  source 1..23: mol_type = other RNA
ttgagggtaagtttgttgcctgg

SEQ ID NO: 1578 - RNA, 23 nt, synthetic construct
  source 1..23: mol_type = other RNA
aacattgagggtaagtttgttgc

SEQ ID NO: 1579 - RNA, 23 nt, synthetic construct
  source 1..23: mol_type = other RNA
gctgcaggtgaggctgttgtggc

SEQ ID NO: 1580 - RNA, 23 nt, synthetic construct
  source 1..23: mol_type = other RNA
tgctgcaggtgaggctgttgtgg

SEQ ID NO: 1581 - RNA, 23 nt, synthetic construct
  source 1..23: mol_type = other RNA
actgctgcaggtgaggctgttgt

SEQ ID NO: 1582 - RNA, 23 nt, synthetic construct
  source 1..23: mol_type = other RNA
aatttgtgagtgctgggcctggg

SEQ ID NO: 1583 - RNA, 23 nt, synthetic construct
  source 1..23: mol_type = other RNA
gaatttgtgagtgctgggcctgg

SEQ ID NO: 1584 - RNA, 23 nt, synthetic construct
  source 1..23: mol_type = other RNA
ccaggaatttgtgagtgctgggc

SEQ ID NO: 1585 - RNA, 23 nt, synthetic construct
  source 1..23: mol_type = other RNA
cgctacaggtgaggggtgcaggc

SEQ ID NO: 1586 - RNA, 23 nt, synthetic construct
  source 1..23: mol_type = other RNA
tcgctacaggtgaggggtgcagg

SEQ ID NO: 1587 - RNA, 23 nt, synthetic construct
  source 1..23: mol_type = other RNA
agcatgtatgtccatgctgtggg

SEQ ID NO: 1588 - RNA, 23 nt, synthetic construct
  source 1..23: mol_type = other RNA
aagcatgtatgtccatgctgtgg

SEQ ID NO: 1589 - RNA, 23 nt, synthetic construct
  source 1..23: mol_type = other RNA
agaagcatgtatgtccatgctgt

SEQ ID NO: 1590 - RNA, 23 nt, synthetic construct
  source 1..23: mol_type = other RNA
ctctacggtaggtaccatcctgt

SEQ ID NO: 1591 - RNA, 23 nt, synthetic construct
  source 1..23: mol_type = other RNA
aacaggttggtgaaagctcctgg

SEQ ID NO: 1592 - RNA, 23 nt, synthetic construct
  source 1..23: mol_type = other RNA
atagccaaggtcagctccagcgt

SEQ ID NO: 1593 - RNA, 23 nt, synthetic construct
  source 1..23: mol_type = other RNA
gaaaggtacccgggttgtgctgg

SEQ ID NO: 1594 - RNA, 23 nt, synthetic construct
  source 1..23: mol_type = other RNA
atggaaaggtacccgggttgtgc

SEQ ID NO: 1595 - RNA, 23 nt, synthetic construct
  source 1..23: mol_type = other RNA
aaatggaaaggtacccgggttgt

SEQ ID NO: 1596 - RNA, 23 nt, synthetic construct
  source 1..23: mol_type = other RNA
tctccttagacgacttacagtga

SEQ ID NO: 1597 - RNA, 23 nt, synthetic construct
  source 1..23: mol_type = other RNA
tttctccttagacgacttacagt

SEQ ID NO: 1598 - RNA, 23 nt, synthetic construct
  source 1..23: mol_type = other RNA
ttctgcagcctgagagaggccga

SEQ ID NO: 1599 - RNA, 23 nt, synthetic construct
  source 1..23: mol_type = other RNA
tccttctgcagcctgagagaggc

SEQ ID NO: 1600 - RNA, 23 nt, synthetic construct
  source 1..23: mol_type = other RNA
ctgcagaaagcacgggaacgggg

SEQ ID NO: 1601 - RNA, 23 nt, synthetic construct
  source 1..23: mol_type = other RNA
tctgcagaaagcacgggaacggg

SEQ ID NO: 1602 - RNA, 23 nt, synthetic construct
  source 1..23: mol_type = other RNA
ctctgcagaaagcacgggaacgg

SEQ ID NO: 1603 - RNA, 23 nt, synthetic construct
  source 1..23: mol_type = other RNA
tcccaggcccaaatgcagtctgg

SEQ ID NO: 1604 - RNA, 23 nt, synthetic construct
  source 1..23: mol_type = other RNA
cccttcccaggcccaaatgcagt

SEQ ID NO: 1605 - RNA, 23 nt, synthetic construct
  source 1..23: mol_type = other RNA
aaacagattcgccacttgagaga

SEQ ID NO: 1606 - RNA, 23 nt, synthetic construct
  source 1..23: mol_type = other RNA
tgaaacagattcgccacttgaga

SEQ ID NO: 1607 - RNA, 23 nt, synthetic construct
  source 1..23: mol_type = other RNA
tctgaaacagattcgccacttga

SEQ ID NO: 1608 - RNA, 23 nt, synthetic construct
  source 1..23: mol_type = other RNA
gcctaggagctgaaaatcctggt

SEQ ID NO: 1609 - RNA, 23 nt, synthetic construct
  source 1..23: mol_type = other RNA
cgcctaggagctgaaaatcctgg

SEQ ID NO: 1610 - RNA, 23 nt, synthetic construct
  source 1..23: mol_type = other RNA
tcaatcatggtaagtgccatggc

SEQ ID NO: 1611 - RNA, 23 nt, synthetic construct
  source 1..23: mol_type = other RNA
atcaatcatggtaagtgccatgg

SEQ ID NO: 1612 - RNA, 23 nt, synthetic construct
  source 1..23: mol_type = other RNA
gcaaaggtaagcaggcgaaatgt

SEQ ID NO: 1613 - RNA, 23 nt, synthetic construct
  source 1..23: mol_type = other RNA
agcaggtagaagccggggcaagg

SEQ ID NO: 1614 - RNA, 23 nt, synthetic construct
  source 1..23: mol_type = other RNA
gccaagcaggtagaagccggggc

SEQ ID NO: 1615 - RNA, 23 nt, synthetic construct
  source 1..23: mol_type = other RNA
cgccaagcaggtagaagccgggg

SEQ ID NO: 1616 - RNA, 23 nt, synthetic construct
  source 1..23: mol_type = other RNA
caaaggtgaggtgcccggggagg

SEQ ID NO: 1617 - RNA, 23 nt, synthetic construct
  source 1..23: mol_type = other RNA
aacaaaggtgaggtgcccgggga

SEQ ID NO: 1618 - RNA, 23 nt, synthetic construct
  source 1..23: mol_type = other RNA
gaacaaaggtgaggtgcccgggg

SEQ ID NO: 1619 - RNA, 23 nt, synthetic construct
  source 1..23: mol_type = other RNA
ggaacaaaggtgaggtgcccggg

SEQ ID NO: 1620 - RNA, 23 nt, synthetic construct
  source 1..23: mol_type = other RNA
tggaacaaaggtgaggtgcccgg

SEQ ID NO: 1621 - RNA, 23 nt, synthetic construct
  source 1..23: mol_type = other RNA
tgcaggtaagaaagcacctgggt

SEQ ID NO: 1622 - RNA, 23 nt, synthetic construct
  source 1..23: mol_type = other RNA
gtgcaggtaagaaagcacctggg

SEQ ID NO: 1623 - RNA, 23 nt, synthetic construct
  source 1..23: mol_type = other RNA
cgtgcaggtaagaaagcacctgg

SEQ ID NO: 1624 - RNA, 23 nt, synthetic construct
  source 1..23: mol_type = other RNA
agacggtgagttccctttggtgc

SEQ ID NO: 1625 - RNA, 23 nt, synthetic construct
  source 1..23: mol_type = other RNA
gcagacggtgagttccctttggt

SEQ ID NO: 1626 - RNA, 23 nt, synthetic construct
  source 1..23: mol_type = other RNA
tgcagacggtgagttccctttgg

SEQ ID NO: 1627 - RNA, 23 nt, synthetic construct
  source 1..23: mol_type = other RNA
aaactgtgagtgtccctcagggc

SEQ ID NO: 1628 - RNA, 23 nt, synthetic construct
  source 1..23: mol_type = other RNA
taaactgtgagtgtccctcaggg

SEQ ID NO: 1629 - RNA, 23 nt, synthetic construct
  source 1..23: mol_type = other RNA
ctaaactgtgagtgtccctcagg

SEQ ID NO: 1630 - RNA, 23 nt, synthetic construct
  source 1..23: mol_type = other RNA
cctccgaatggtgagaccttggc

SEQ ID NO: 1631 - RNA, 23 nt, synthetic construct
  source 1..23: mol_type = other RNA
atccaggtgaggccgcccctggc

SEQ ID NO: 1632 - RNA, 23 nt, synthetic construct
  source 1..23: mol_type = other RNA
gatccaggtgaggccgcccctgg

SEQ ID NO: 1633 - RNA, 23 nt, synthetic construct
  source 1..23: mol_type = other RNA
ctggaggtgaggcccaggcagga

SEQ ID NO: 1634 - RNA, 23 nt, synthetic construct
  source 1..23: mol_type = other RNA
cctggaggtgaggcccaggcagg

SEQ ID NO: 1635 - RNA, 23 nt, synthetic construct
  source 1..23: mol_type = other RNA
tgccctggaggtgaggcccaggc

SEQ ID NO: 1636 - RNA, 23 nt, synthetic construct
  source 1..23: mol_type = other RNA
accaggtactgcttgtccccggc

SEQ ID NO: 1637 - RNA, 23 nt, synthetic construct
  source 1..23: mol_type = other RNA
caccaggtactgcttgtccccgg

SEQ ID NO: 1638 - RNA, 23 nt, synthetic construct
  source 1..23: mol_type = other RNA
aaataggtttggttgcttcttga

SEQ ID NO: 1639 - RNA, 23 nt, synthetic construct
  source 1..23: mol_type = other RNA
tcttgtacagcttgccatcgaga

SEQ ID NO: 1640 - RNA, 23 nt, synthetic construct
  source 1..23: mol_type = other RNA
tgagttcacaggttgccacatga

SEQ ID NO: 1641 - RNA, 23 nt, synthetic construct
  source 1..23: mol_type = other RNA
tctcctaggcttcccctgcagga

SEQ ID NO: 1642 - RNA, 23 nt, synthetic construct
  source 1..23: mol_type = other RNA
ctctcctaggcttcccctgcagg

SEQ ID NO: 1643 - RNA, 23 nt, synthetic construct
  source 1..23: mol_type = other RNA
tgactcagggagattcaggtggt

SEQ ID NO: 1644 - RNA, 23 nt, synthetic construct
  source 1..23: mol_type = other RNA
gtgactcagggagattcaggtgg

SEQ ID NO: 1645 - RNA, 23 nt, synthetic construct
  source 1..23: mol_type = other RNA
ctgtgactcagggagattcaggt

SEQ ID NO: 1646 - RNA, 23 nt, synthetic construct
  source 1..23: mol_type = other RNA
taccggtgagtacaattcaaggt

SEQ ID NO: 1647 - RNA, 23 nt, synthetic construct
  source 1..23: mol_type = other RNA
gtaccggtgagtacaattcaagg

SEQ ID NO: 1648 - RNA, 23 nt, synthetic construct
  source 1..23: mol_type = other RNA
ctttacctggtaatgtgatttga

SEQ ID NO: 1649 - RNA, 23 nt, synthetic construct
  source 1..23: mol_type = other RNA
tttgatgggtaagtgttggatgc

SEQ ID NO: 1650 - RNA, 23 nt, synthetic construct
  source 1..23: mol_type = other RNA
ttacactggtatgtagcatatgt

SEQ ID NO: 1651 - RNA, 23 nt, synthetic construct
  source 1..23: mol_type = other RNA
aaggagaaaggtaagcatgacgc

SEQ ID NO: 1652 - RNA, 23 nt, synthetic construct
  source 1..23: mol_type = other RNA
tgcttgtaaggtaactcatgaga

SEQ ID NO: 1653 - RNA, 23 nt, synthetic construct
  source 1..23: mol_type = other RNA
gggccaggatccgtggaggttgc

SEQ ID NO: 1654 - RNA, 23 nt, synthetic construct
  source 1..23: mol_type = other RNA
atggggccaggatccgtggaggt

SEQ ID NO: 1655 - RNA, 23 nt, synthetic construct
  source 1..23: mol_type = other RNA
catggggccaggatccgtggagg

SEQ ID NO: 1656 - RNA, 23 nt, synthetic construct
  source 1..23: mol_type = other RNA
gcttctgcaggccttgaagttgc

SEQ ID NO: 1657 - RNA, 23 nt, synthetic construct
  source 1..23: mol_type = other RNA
tggaaagacggaggcagcctggt

SEQ ID NO: 1658 - RNA, 23 nt, synthetic construct
  source 1..23: mol_type = other RNA
ttggaaagacggaggcagcctgg

SEQ ID NO: 1659 - RNA, 23 nt, synthetic construct
  source 1..23: mol_type = other RNA
gtcgagcaggccagcaagtgtga

SEQ ID NO: 1660 - RNA, 23 nt, synthetic construct
  source 1..23: mol_type = other RNA
tcgtcgagcaggccagcaagtgt

SEQ ID NO: 1661 - RNA, 23 nt, synthetic construct
  source 1..23: mol_type = other RNA
tcccaggcctggagtttattcgg

SEQ ID NO: 1662 - RNA, 23 nt, synthetic construct
  source 1..23: mol_type = other RNA
ttccaggtcatcacagttggggc

SEQ ID NO: 1663 - RNA, 23 nt, synthetic construct
  source 1..23: mol_type = other RNA
tttccaggtcatcacagttgggg

SEQ ID NO: 1664 - RNA, 23 nt, synthetic construct
  source 1..23: mol_type = other RNA
ctttccaggtcatcacagttggg

SEQ ID NO: 1665 - RNA, 23 nt, synthetic construct
  source 1..23: mol_type = other RNA
cctttccaggtcatcacagttgg

SEQ ID NO: 1666 - RNA, 23 nt, synthetic construct
  source 1..23: mol_type = other RNA
tgcaccaggcattgcagccatga

SEQ ID NO: 1667 - RNA, 23 nt, synthetic construct
  source 1..23: mol_type = other RNA
ttgcaggttggcagctgttttgc

SEQ ID NO: 1668 - RNA, 23 nt, synthetic construct
  source 1..23: mol_type = other RNA
ctctaaggcccaagggggcaagc

SEQ ID NO: 1669 - RNA, 23 nt, synthetic construct
  source 1..23: mol_type = other RNA
ttgactctaaggcccaagggggc

SEQ ID NO: 1670 - RNA, 23 nt, synthetic construct
  source 1..23: mol_type = other RNA
ccccaggctgcagctcccactgg

SEQ ID NO: 1671 - RNA, 23 nt, synthetic construct
  source 1..23: mol_type = other RNA
tggcaggtgaccgtggcctgcga

SEQ ID NO: 1672 - RNA, 23 nt, synthetic construct
  source 1..23: mol_type = other RNA
tctggcaggtgaccgtggcctgc

SEQ ID NO: 1673 - RNA, 23 nt, synthetic construct
  source 1..23: mol_type = other RNA
ccaaggtgcgggtgtagggatgg

SEQ ID NO: 1674 - RNA, 23 nt, synthetic construct
  source 1..23: mol_type = other RNA
gcgccaaggtgcgggtgtaggga

SEQ ID NO: 1675 - RNA, 23 nt, synthetic construct
  source 1..23: mol_type = other RNA
tgcgccaaggtgcgggtgtaggg

SEQ ID NO: 1676 - RNA, 23 nt, synthetic construct
  source 1..23: mol_type = other RNA
ctgcgccaaggtgcgggtgtagg

SEQ ID NO: 1677 - RNA, 23 nt, synthetic construct
  source 1..23: mol_type = other RNA
cccccggtaagacccccatctgt

SEQ ID NO: 1678 - RNA, 23 nt, synthetic construct
  source 1..23: mol_type = other RNA
gacaggtaagcacggccgtctga

SEQ ID NO: 1679 - RNA, 23 nt, synthetic construct
  source 1..23: mol_type = other RNA
cacagacaggtaagcacggccgt

SEQ ID NO: 1680 - RNA, 23 nt, synthetic construct
  source 1..23: mol_type = other RNA
cataggtaagtgatggccccaga

SEQ ID NO: 1681 - RNA, 23 nt, synthetic construct
  source 1..23: mol_type = other RNA
cccgaggtaggtgctggggctgc

SEQ ID NO: 1682 - RNA, 23 nt, synthetic construct
  source 1..23: mol_type = other RNA
gctcccgaggtaggtgctggggc

SEQ ID NO: 1683 - RNA, 23 nt, synthetic construct
  source 1..23: mol_type = other RNA
agctcccgaggtaggtgctgggg

SEQ ID NO: 1684 - RNA, 23 nt, synthetic construct
  source 1..23: mol_type = other RNA
ggcaggtaagcaggatggcaggg

SEQ ID NO: 1685 - RNA, 23 nt, synthetic construct
  source 1..23: mol_type = other RNA
gggcaggtaagcaggatggcagg

SEQ ID NO: 1686 - RNA, 23 nt, synthetic construct
  source 1..23: mol_type = other RNA
atggggcaggtaagcaggatggc

SEQ ID NO: 1687 - RNA, 23 nt, synthetic construct
  source 1..23: mol_type = other RNA
catggggcaggtaagcaggatgg

SEQ ID NO: 1688 - RNA, 23 nt, synthetic construct
  source 1..23: mol_type = other RNA
cacaggtaggaggctgggcttgc

SEQ ID NO: 1689 - RNA, 23 nt, synthetic construct
  source 1..23: mol_type = other RNA
tcctcacaggtaggaggctgggc

SEQ ID NO: 1690 - RNA, 23 nt, synthetic construct
  source 1..23: mol_type = other RNA
gtcctcacaggtaggaggctggg

SEQ ID NO: 1691 - RNA, 23 nt, synthetic construct
  source 1..23: mol_type = other RNA
agcaggtgaagaggcccgtgagg

SEQ ID NO: 1692 - RNA, 23 nt, synthetic construct
  source 1..23: mol_type = other RNA
ggagcaggtgaagaggcccgtga

SEQ ID NO: 1693 - RNA, 23 nt, synthetic construct
  source 1..23: mol_type = other RNA
caggagcaggtgaagaggcccgt

SEQ ID NO: 1694 - RNA, 23 nt, synthetic construct
  source 1..23: mol_type = other RNA
tctctcagactccccagacaggc

SEQ ID NO: 1695 - RNA, 23 nt, synthetic construct
  source 1..23: mol_type = other RNA
atctctcagactccccagacagg

SEQ ID NO: 1696 - RNA, 23 nt, synthetic construct
  source 1..23: mol_type = other RNA
cttccagagagaagggcagaagt

SEQ ID NO: 1697 - RNA, 23 nt, synthetic construct
  source 1..23: mol_type = other RNA
gcccttccagagagaagggcaga

SEQ ID NO: 1698 - RNA, 23 nt, synthetic construct
  source 1..23: mol_type = other RNA
ctgcagggacaataggagccagg

SEQ ID NO: 1699 - RNA, 23 nt, synthetic construct
  source 1..23: mol_type = other RNA
ttctctgcagggacaataggagc

SEQ ID NO: 1700 - RNA, 23 nt, synthetic construct
  source 1..23: mol_type = other RNA
tcaaagaaggaggacccctcagc

SEQ ID NO: 1701 - RNA, 23 nt, synthetic construct
  source 1..23: mol_type = other RNA
cttaggtaggtggggtcggcggt

SEQ ID NO: 1702 - RNA, 23 nt, synthetic construct
  source 1..23: mol_type = other RNA
tcttaggtaggtggggtcggcgg

SEQ ID NO: 1703 - RNA, 23 nt, synthetic construct
  source 1..23: mol_type = other RNA
gttcttaggtaggtggggtcggc

SEQ ID NO: 1704 - RNA, 23 nt, synthetic construct
  source 1..23: mol_type = other RNA
ggttcttaggtaggtggggtcgg

SEQ ID NO: 1705 - RNA, 23 nt, synthetic construct
  source 1..23: mol_type = other RNA
gtgacaggtgcggcctcggaggc

SEQ ID NO: 1706 - RNA, 23 nt, synthetic construct
  source 1..23: mol_type = other RNA
ggtgacaggtgcggcctcggagg

SEQ ID NO: 1707 - RNA, 23 nt, synthetic construct
  source 1..23: mol_type = other RNA
agggtgacaggtgcggcctcgga

SEQ ID NO: 1708 - RNA, 23 nt, synthetic construct
  source 1..23: mol_type = other RNA
gcacgaggtaacgtcatcccagc

SEQ ID NO: 1709 - RNA, 23 nt, synthetic construct
  source 1..23: mol_type = other RNA
tcttccaggctgcccccaagtgt

SEQ ID NO: 1710 - RNA, 23 nt, synthetic construct
  source 1..23: mol_type = other RNA
tctcttccaggctgcccccaagt

SEQ ID NO: 1711 - RNA, 23 nt, synthetic construct
  source 1..23: mol_type = other RNA
tgtttaggttattggagtgatga

SEQ ID NO: 1712 - RNA, 23 nt, synthetic construct
  source 1..23: mol_type = other RNA
tcctgtttaggttattggagtga

SEQ ID NO: 1713 - RNA, 23 nt, synthetic construct
  source 1..23: mol_type = other RNA
ggacagatctattccagagggga

SEQ ID NO: 1714 - RNA, 23 nt, synthetic construct
  source 1..23: mol_type = other RNA
tggacagatctattccagagggg

SEQ ID NO: 1715 - RNA, 23 nt, synthetic construct
  source 1..23: mol_type = other RNA
ttggacagatctattccagaggg

SEQ ID NO: 1716 - RNA, 23 nt, synthetic construct
  source 1..23: mol_type = other RNA
tttggacagatctattccagagg

SEQ ID NO: 1717 - RNA, 23 nt, synthetic construct
  source 1..23: mol_type = other RNA
tttcagcacaaacacagagcagt

SEQ ID NO: 1718 - RNA, 23 nt, synthetic construct
  source 1..23: mol_type = other RNA
ttatttcagcacaaacacagagc

SEQ ID NO: 1719 - RNA, 23 nt, synthetic construct
  source 1..23: mol_type = other RNA
ctttatttcagcacaaacacaga

SEQ ID NO: 1720 - RNA, 23 nt, synthetic construct
  source 1..23: mol_type = other RNA
ttcccaggtccacctgagagtgc

SEQ ID NO: 1721 - RNA, 23 nt, synthetic construct
  source 1..23: mol_type = other RNA
tcttcccaggtccacctgagagt

SEQ ID NO: 1722 - RNA, 23 nt, synthetic construct
  source 1..23: mol_type = other RNA
cttcttcccaggtccacctgaga

SEQ ID NO: 1723 - RNA, 23 nt, synthetic construct
  source 1..23: mol_type = other RNA
cactgtaggtctgccacaagaga

SEQ ID NO: 1724 - RNA, 23 nt, synthetic construct
  source 1..23: mol_type = other RNA
tacactgtaggtctgccacaaga

SEQ ID NO: 1725 - RNA, 23 nt, synthetic construct
  source 1..23: mol_type = other RNA
tacgaccttggtaaggaacttga

SEQ ID NO: 1726 - RNA, 23 nt, synthetic construct
  source 1..23: mol_type = other RNA
cagtgaagaggtaagcctctggt

SEQ ID NO: 1727 - RNA, 23 nt, synthetic construct
  source 1..23: mol_type = other RNA
aatctcagtaagtggattacaga

SEQ ID NO: 1728 - RNA, 23 nt, synthetic construct
  source 1..23: mol_type = other RNA
ctgaaggtaggccttgagagaga

SEQ ID NO: 1729 - RNA, 23 nt, synthetic construct
  source 1..23: mol_type = other RNA
atctgaaggtaggccttgagaga

SEQ ID NO: 1730 - RNA, 23 nt, synthetic construct
  source 1..23: mol_type = other RNA
caatctgaaggtaggccttgaga

SEQ ID NO: 1731 - RNA, 23 nt, synthetic construct
  source 1..23: mol_type = other RNA
tttacagatgtggaaatggaggc

SEQ ID NO: 1732 - RNA, 23 nt, synthetic construct
  source 1..23: mol_type = other RNA
ctcctcagttaataacgacatga

SEQ ID NO: 1733 - RNA, 23 nt, synthetic construct
  source 1..23: mol_type = other RNA
ctctaggagaaagaatgacgaga

SEQ ID NO: 1734 - RNA, 23 nt, synthetic construct
  source 1..23: mol_type = other RNA
cactctaggagaaagaatgacga

SEQ ID NO: 1735 - RNA, 23 nt, synthetic construct
  source 1..23: mol_type = other RNA
cttcactctaggagaaagaatga

SEQ ID NO: 1736 - RNA, 23 nt, synthetic construct
  source 1..23: mol_type = other RNA
tgacaggtagatgtaaaatcaga

SEQ ID NO: 1737 - RNA, 23 nt, synthetic construct
  source 1..23: mol_type = other RNA
ccccatcagaatataacaccagc

SEQ ID NO: 1738 - RNA, 23 nt, synthetic construct
  source 1..23: mol_type = other RNA
tgctataggtgggaactgcaaga

SEQ ID NO: 1739 - RNA, 23 nt, synthetic construct
  source 1..23: mol_type = other RNA
ttcacagaagtaaaagattatga

SEQ ID NO: 1740 - RNA, 23 nt, synthetic construct
  source 1..23: mol_type = other RNA
gctacagggcatccagatggtgt

SEQ ID NO: 1741 - RNA, 23 nt, synthetic construct
  source 1..23: mol_type = other RNA
ccgctacagggcatccagatggt

SEQ ID NO: 1742 - RNA, 23 nt, synthetic construct
  source 1..23: mol_type = other RNA
cccgctacagggcatccagatgg

SEQ ID NO: 1743 - RNA, 23 nt, synthetic construct
  source 1..23: mol_type = other RNA
aagtcgggtgagtggtccccagc

SEQ ID NO: 1744 - RNA, 23 nt, synthetic construct
  source 1..23: mol_type = other RNA
ggcaggtaagttagagctagtgc

SEQ ID NO: 1745 - RNA, 23 nt, synthetic construct
  source 1..23: mol_type = other RNA
tgggcaggtaagttagagctagt

SEQ ID NO: 1746 - RNA, 23 nt, synthetic construct
  source 1..23: mol_type = other RNA
gtgggaggtaggtgtggaccagc

SEQ ID NO: 1747 - RNA, 23 nt, synthetic construct
  source 1..23: mol_type = other RNA
accaccaggtaaggagtgagtgt

SEQ ID NO: 1748 - RNA, 23 nt, synthetic construct
  source 1..23: mol_type = other RNA
caaccaccaggtaaggagtgagt

SEQ ID NO: 1749 - RNA, 23 nt, synthetic construct
  source 1..23: mol_type = other RNA
gcccaggtaagggcagctttggt

SEQ ID NO: 1750 - RNA, 23 nt, synthetic construct
  source 1..23: mol_type = other RNA
agcccaggtaagggcagctttgg

SEQ ID NO: 1751 - RNA, 23 nt, synthetic construct
  source 1..23: mol_type = other RNA
aacaggtaagacaggggtctagc

SEQ ID NO: 1752 - RNA, 23 nt, synthetic construct
  source 1..23: mol_type = other RNA
tttgaaacaggtaagacaggggt

SEQ ID NO: 1753 - RNA, 23 nt, synthetic construct
  source 1..23: mol_type = other RNA
accttataggaaaaccagtgagt

SEQ ID NO: 1754 - RNA, 23 nt, synthetic construct
  source 1..23: mol_type = other RNA
acaccttataggaaaaccagtga

SEQ ID NO: 1755 - RNA, 23 nt, synthetic construct
  source 1..23: mol_type = other RNA
ctctcataggtggtattcacagc

SEQ ID NO: 1756 - RNA, 23 nt, synthetic construct
  source 1..23: mol_type = other RNA
ccctacggtgagtgtttctgtga

SEQ ID NO: 1757 - RNA, 23 nt, synthetic construct
  source 1..23: mol_type = other RNA
ggccctacggtgagtgtttctgt

SEQ ID NO: 1758 - RNA, 23 nt, synthetic construct
  source 1..23: mol_type = other RNA
gcctctgggtaagttgccaaaga

SEQ ID NO: 1759 - RNA, 23 nt, synthetic construct
  source 1..23: mol_type = other RNA
gcatgcagaggtgagtatacaga

SEQ ID NO: 1760 - RNA, 23 nt, synthetic construct
  source 1..23: mol_type = other RNA
tgtcctcagtggtcccaggctgc

SEQ ID NO: 1761 - RNA, 23 nt, synthetic construct
  source 1..23: mol_type = other RNA
catgcagtggtgaagttcatgga

SEQ ID NO: 1762 - RNA, 23 nt, synthetic construct
  source 1..23: mol_type = other RNA
tcatgcagtggtgaagttcatgg

SEQ ID NO: 1763 - RNA, 23 nt, synthetic construct
  source 1..23: mol_type = other RNA
attgcagaccaaagaaagataga

SEQ ID NO: 1764 - RNA, 23 nt, synthetic construct
  source 1..23: mol_type = other RNA
acccattgcagaccaaagaaaga

SEQ ID NO: 1765 - RNA, 23 nt, synthetic construct
  source 1..23: mol_type = other RNA
tttccagaaaatcagttcgagga

SEQ ID NO: 1766 - RNA, 23 nt, synthetic construct
  source 1..23: mol_type = other RNA
tttgcagtccctgtgggccttgc

SEQ ID NO: 1767 - RNA, 23 nt, synthetic construct
  source 1..23: mol_type = other RNA
cctcagatgtgacaagccgaggc

SEQ ID NO: 1768 - RNA, 23 nt, synthetic construct
  source 1..23: mol_type = other RNA
ccctcagatgtgacaagccgagg

SEQ ID NO: 1769 - RNA, 23 nt, synthetic construct
  source 1..23: mol_type = other RNA
ttccctcagatgtgacaagccga

SEQ ID NO: 1770 - RNA, 23 nt, synthetic construct
  source 1..23: mol_type = other RNA
catgccaaggtaagcggtcgtgc

SEQ ID NO: 1771 - RNA, 23 nt, synthetic construct
  source 1..23: mol_type = other RNA
cgaaggtgagtccccctggctgt

SEQ ID NO: 1772 - RNA, 23 nt, synthetic construct
  source 1..23: mol_type = other RNA
tcacgaaggtgagtccccctggc

SEQ ID NO: 1773 - RNA, 23 nt, synthetic construct
  source 1..23: mol_type = other RNA
atcacgaaggtgagtccccctgg

SEQ ID NO: 1774 - RNA, 23 nt, synthetic construct
  source 1..23: mol_type = other RNA
catgcaggtgggcatctttggga

SEQ ID NO: 1775 - RNA, 23 nt, synthetic construct
  source 1..23: mol_type = other RNA
ccatgcaggtgggcatctttggg

SEQ ID NO: 1776 - RNA, 23 nt, synthetic construct
  source 1..23: mol_type = other RNA
accatgcaggtgggcatctttgg

SEQ ID NO: 1777 - RNA, 23 nt, synthetic construct
  source 1..23: mol_type = other RNA
tgcaggtgaggatgtagtcacgg

SEQ ID NO: 1778 - RNA, 23 nt, synthetic construct
  source 1..23: mol_type = other RNA
gtgaatgcaggtgaggatgtagt

SEQ ID NO: 1779 - RNA, 23 nt, synthetic construct
  source 1..23: mol_type = other RNA
acaagaaaagtaagtggccctga

SEQ ID NO: 1780 - RNA, 23 nt, synthetic construct
  source 1..23: mol_type = other RNA
cccccagtacaacctccgcctgc

SEQ ID NO: 1781 - RNA, 23 nt, synthetic construct
  source 1..23: mol_type = other RNA
ctggcccccagtacaacctccgc

SEQ ID NO: 1782 - RNA, 23 nt, synthetic construct
  source 1..23: mol_type = other RNA
ttgcaggttggttcccagagggc

SEQ ID NO: 1783 - RNA, 23 nt, synthetic construct
  source 1..23: mol_type = other RNA
cttgcaggttggttcccagaggg

SEQ ID NO: 1784 - RNA, 23 nt, synthetic construct
  source 1..23: mol_type = other RNA
acttgcaggttggttcccagagg

SEQ ID NO: 1785 - RNA, 23 nt, synthetic construct
  source 1..23: mol_type = other RNA
gtacttgcaggttggttcccaga

SEQ ID NO: 1786 - RNA, 23 nt, synthetic construct
  source 1..23: mol_type = other RNA
ttccctgaaatccagacaggaga

SEQ ID NO: 1787 - RNA, 23 nt, synthetic construct
  source 1..23: mol_type = other RNA
gtcctggggagatgatgcacagt

SEQ ID NO: 1788 - RNA, 23 nt, synthetic construct
  source 1..23: mol_type = other RNA
cctgcaaagcagcagacatcagg

SEQ ID NO: 1789 - RNA, 23 nt, synthetic construct
  source 1..23: mol_type = other RNA
ggtaaggcaaacctctctgctgg

SEQ ID NO: 1790 - RNA, 23 nt, synthetic construct
  source 1..23: mol_type = other RNA
caaggtaaggcaaacctctctgc

SEQ ID NO: 1791 - RNA, 23 nt, synthetic construct
  source 1..23: mol_type = other RNA
ggtatgtgtgagcctgtgtctgt

SEQ ID NO: 1792 - RNA, 23 nt, synthetic construct
  source 1..23: mol_type = other RNA
gggaggtatgtgtgagcctgtgt

SEQ ID NO: 1793 - RNA, 23 nt, synthetic construct
  source 1..23: mol_type = other RNA
tctggatatagagagtaggttgg

SEQ ID NO: 1794 - RNA, 23 nt, synthetic construct
  source 1..23: mol_type = other RNA
aagtctggatatagagagtaggt

SEQ ID NO: 1795 - RNA, 23 nt, synthetic construct
  source 1..23: mol_type = other RNA
aaagtctggatatagagagtagg

SEQ ID NO: 1796 - RNA, 23 nt, synthetic construct
  source 1..23: mol_type = other RNA
aatgcctagaatcaataaaatgt

SEQ ID NO: 1797 - RNA, 23 nt, synthetic construct
  source 1..23: mol_type = other RNA
cctcctaaaggagatagatatgc

SEQ ID NO: 1798 - RNA, 23 nt, synthetic construct
  source 1..23: mol_type = other RNA
agtaagtagaaaataaagagggt

SEQ ID NO: 1799 - RNA, 23 nt, synthetic construct
  source 1..23: mol_type = other RNA
aagtaagtagaaaataaagaggg

SEQ ID NO: 1800 - RNA, 23 nt, synthetic construct
  source 1..23: mol_type = other RNA
aaagtaagtagaaaataaagagg

SEQ ID NO: 1801 - RNA, 23 nt, synthetic construct
  source 1..23: mol_type = other RNA
ttaaagtaagtagaaaataaaga

SEQ ID NO: 1802 - RNA, 23 nt, synthetic construct
  source 1..23: mol_type = other RNA
gatggtaagacactttggtgggt

SEQ ID NO: 1803 - RNA, 23 nt, synthetic construct
  source 1..23: mol_type = other RNA
tgatggtaagacactttggtggg

SEQ ID NO: 1804 - RNA, 23 nt, synthetic construct
  source 1..23: mol_type = other RNA
caggtaaaacctgtctaaggaga

SEQ ID NO: 1805 - RNA, 23 nt, synthetic construct
  source 1..23: mol_type = other RNA
atcaggtaaaacctgtctaagga

SEQ ID NO: 1806 - RNA, 23 nt, synthetic construct
  source 1..23: mol_type = other RNA
agctcctgaggaaagagcagggc

SEQ ID NO: 1807 - RNA, 23 nt, synthetic construct
  source 1..23: mol_type = other RNA
cccctaaatcagtcaggggaagc

SEQ ID NO: 1808 - RNA, 23 nt, synthetic construct
  source 1..23: mol_type = other RNA
cgtaagcacttggtgggactggg

SEQ ID NO: 1809 - RNA, 23 nt, synthetic construct
  source 1..23: mol_type = other RNA
ccgtaagcacttggtgggactgg

SEQ ID NO: 1810 - RNA, 23 nt, synthetic construct
  source 1..23: mol_type = other RNA
acctgaggaatatcgggaaaaga

SEQ ID NO: 1811 - RNA, 23 nt, synthetic construct
  source 1..23: mol_type = other RNA
gggtaagtcttacattcttttgt

SEQ ID NO: 1812 - RNA, 23 nt, synthetic construct
  source 1..23: mol_type = other RNA
tcctgtgtgagcagaaaagagga

SEQ ID NO: 1813 - RNA, 23 nt, synthetic construct
  source 1..23: mol_type = other RNA
ttcctgtgtgagcagaaaagagg

SEQ ID NO: 1814 - RNA, 23 nt, synthetic construct
  source 1..23: mol_type = other RNA
gcttcctgtgtgagcagaaaaga

SEQ ID NO: 1815 - RNA, 23 nt, synthetic construct
  source 1..23: mol_type = other RNA
cctgtggggaaacgagggtcagc

SEQ ID NO: 1816 - RNA, 23 nt, synthetic construct
  source 1..23: mol_type = other RNA
ggcccctgtggggaaacgagggt

SEQ ID NO: 1817 - RNA, 23 nt, synthetic construct
  source 1..23: mol_type = other RNA
gtctagtgaggagaaagagggga

SEQ ID NO: 1818 - RNA, 23 nt, synthetic construct
  source 1..23: mol_type = other RNA
agtctagtgaggagaaagagggg

SEQ ID NO: 1819 - RNA, 23 nt, synthetic construct
  source 1..23: mol_type = other RNA
aagtctagtgaggagaaagaggg

SEQ ID NO: 1820 - RNA, 23 nt, synthetic construct
  source 1..23: mol_type = other RNA
caagtctagtgaggagaaagagg

SEQ ID NO: 1821 - RNA, 23 nt, synthetic construct
  source 1..23: mol_type = other RNA
acatctaggagaggaagagagga

SEQ ID NO: 1822 - RNA, 23 nt, synthetic construct
  source 1..23: mol_type = other RNA
aacatctaggagaggaagagagg

SEQ ID NO: 1823 - RNA, 23 nt, synthetic construct
  source 1..23: mol_type = other RNA
actctgatgggagacaccagggt

SEQ ID NO: 1824 - RNA, 23 nt, synthetic construct
  source 1..23: mol_type = other RNA
cactctgatgggagacaccaggg

SEQ ID NO: 1825 - RNA, 23 nt, synthetic construct
  source 1..23: mol_type = other RNA
tcactctgatgggagacaccagg

SEQ ID NO: 1826 - RNA, 23 nt, synthetic construct
  source 1..23: mol_type = other RNA
tcttatggagaggaaagaagggg

SEQ ID NO: 1827 - RNA, 23 nt, synthetic construct
  source 1..23: mol_type = other RNA
ttcttatggagaggaaagaaggg

SEQ ID NO: 1828 - RNA, 23 nt, synthetic construct
  source 1..23: mol_type = other RNA
tttcttatggagaggaaagaagg

SEQ ID NO: 1829 - RNA, 23 nt, synthetic construct
  source 1..23: mol_type = other RNA
ggtactgatccaggctctggtgc

SEQ ID NO: 1830 - RNA, 23 nt, synthetic construct
  source 1..23: mol_type = other RNA
aaggtactgatccaggctctggt

SEQ ID NO: 1831 - RNA, 23 nt, synthetic construct
  source 1..23: mol_type = other RNA
gaaggtactgatccaggctctgg

SEQ ID NO: 1832 - RNA, 23 nt, synthetic construct
  source 1..23: mol_type = other RNA
ggtgagtggctgtggggagaggg

SEQ ID NO: 1833 - RNA, 23 nt, synthetic construct
  source 1..23: mol_type = other RNA
aggtgagtggctgtggggagagg

SEQ ID NO: 1834 - RNA, 23 nt, synthetic construct
  source 1..23: mol_type = other RNA
gcaggtgagtggctgtggggaga

SEQ ID NO: 1835 - RNA, 23 nt, synthetic construct
  source 1..23: mol_type = other RNA
ggtgaggcacaggcttcagaagt

SEQ ID NO: 1836 - RNA, 23 nt, synthetic construct
  source 1..23: mol_type = other RNA
acaggtgaggcacaggcttcaga

SEQ ID NO: 1837 - RNA, 23 nt, synthetic construct
  source 1..23: mol_type = other RNA
ctgtaagtgctgggccaggatgc

SEQ ID NO: 1838 - RNA, 23 nt, synthetic construct
  source 1..23: mol_type = other RNA
cacctgtaagtgctgggccagga

SEQ ID NO: 1839 - RNA, 23 nt, synthetic construct
  source 1..23: mol_type = other RNA
caggtaggaaggagcctccccgc

SEQ ID NO: 1840 - RNA, 23 nt, synthetic construct
  source 1..23: mol_type = other RNA
ggtgagtgatggggcatcctggc

SEQ ID NO: 1841 - RNA, 23 nt, synthetic construct
  source 1..23: mol_type = other RNA
cggtgagtgatggggcatcctgg

SEQ ID NO: 1842 - RNA, 23 nt, synthetic construct
  source 1..23: mol_type = other RNA
tctgcagagaagggtttggggga

SEQ ID NO: 1843 - RNA, 23 nt, synthetic construct
  source 1..23: mol_type = other RNA
atctgcagagaagggtttggggg

SEQ ID NO: 1844 - RNA, 23 nt, synthetic construct
  source 1..23: mol_type = other RNA
gatctgcagagaagggtttgggg

SEQ ID NO: 1845 - RNA, 23 nt, synthetic construct
  source 1..23: mol_type = other RNA
tgatctgcagagaagggtttggg

SEQ ID NO: 1846 - RNA, 23 nt, synthetic construct
  source 1..23: mol_type = other RNA
gtgatctgcagagaagggtttgg

SEQ ID NO: 1847 - RNA, 23 nt, synthetic construct
  source 1..23: mol_type = other RNA
gctgcacaataaaataaattggg

SEQ ID NO: 1848 - RNA, 23 nt, synthetic construct
  source 1..23: mol_type = other RNA
tgctgcacaataaaataaattgg

SEQ ID NO: 1849 - RNA, 23 nt, synthetic construct
  source 1..23: mol_type = other RNA
taaactgaaaatttgaaagaagc

SEQ ID NO: 1850 - RNA, 23 nt, synthetic construct
  source 1..23: mol_type = other RNA
acctggagaagagacaatcaagc

SEQ ID NO: 1851 - RNA, 23 nt, synthetic construct
  source 1..23: mol_type = other RNA
aaaacctgttaaaacaagaaaga

SEQ ID NO: 1852 - RNA, 23 nt, synthetic construct
  source 1..23: mol_type = other RNA
tctgtgagaagtattgaaacaga

SEQ ID NO: 1853 - RNA, 23 nt, synthetic construct
  source 1..23: mol_type = other RNA
ggcctgcagcatgagagcaaaga

SEQ ID NO: 1854 - RNA, 23 nt, synthetic construct
  source 1..23: mol_type = other RNA
catcctgtgccatagagtatgga

SEQ ID NO: 1855 - RNA, 23 nt, synthetic construct
  source 1..23: mol_type = other RNA
tcatcctgtgccatagagtatgg

SEQ ID NO: 1856 - RNA, 23 nt, synthetic construct
  source 1..23: mol_type = other RNA
actttatcaaaagggaaaaaaga

SEQ ID NO: 1857 - RNA, 23 nt, synthetic construct
  source 1..23: mol_type = other RNA
tctgtaaggacagtgtaaaaagg

SEQ ID NO: 1858 - RNA, 23 nt, synthetic construct
  source 1..23: mol_type = other RNA
ttacctgaaaagaattataatga

SEQ ID NO: 1859 - RNA, 23 nt, synthetic construct
  source 1..23: mol_type = other RNA
gcctgtgaaaaggagagcattga

SEQ ID NO: 1860 - RNA, 23 nt, synthetic construct
  source 1..23: mol_type = other RNA
cgctatattccatgagcaagaga

SEQ ID NO: 1861 - RNA, 23 nt, synthetic construct
  source 1..23: mol_type = other RNA
aacgctatattccatgagcaaga

SEQ ID NO: 1862 - RNA, 23 nt, synthetic construct
  source 1..23: mol_type = other RNA
tgctggtatagatatacaaaaga

SEQ ID NO: 1863 - RNA, 23 nt, synthetic construct
  source 1..23: mol_type = other RNA
gcctgcaggtaaaagcatatgga

SEQ ID NO: 1864 - RNA, 23 nt, synthetic construct
  source 1..23: mol_type = other RNA
cgcctgcaggtaaaagcatatgg

SEQ ID NO: 1865 - RNA, 23 nt, synthetic construct
  source 1..23: mol_type = other RNA
ttcctgtaagataccaaaaaggc

SEQ ID NO: 1866 - RNA, 23 nt, synthetic construct
  source 1..23: mol_type = other RNA
gttcctgtaagataccaaaaagg

SEQ ID NO: 1867 - RNA, 23 nt, synthetic construct
  source 1..23: mol_type = other RNA
tcaccctgcaaaggaccaaatgt

SEQ ID NO: 1868 - RNA, 23 nt, synthetic construct
  source 1..23: mol_type = other RNA
cctacaggacagcaggaagaaga

SEQ ID NO: 1869 - RNA, 23 nt, synthetic construct
  source 1..23: mol_type = other RNA
ggtcctacaggacagcaggaaga

SEQ ID NO: 1870 - RNA, 23 nt, synthetic construct
  source 1..23: mol_type = other RNA
gcctgtgaaatgagatgaaaaga

SEQ ID NO: 1871 - RNA, 23 nt, synthetic construct
  source 1..23: mol_type = other RNA
tctaaattggcaatatgacaagg

SEQ ID NO: 1872 - RNA, 23 nt, synthetic construct
  source 1..23: mol_type = other RNA
gcctgtgtgcaatagtcaaaagc

SEQ ID NO: 1873 - RNA, 23 nt, synthetic construct
  source 1..23: mol_type = other RNA
ccacctgggaggaaaaggagaga

SEQ ID NO: 1874 - RNA, 23 nt, synthetic construct
  source 1..23: mol_type = other RNA
ggtaggtgtatcttatgttgcgt

SEQ ID NO: 1875 - RNA, 23 nt, synthetic construct
  source 1..23: mol_type = other RNA
aaggtaggtgtatcttatgttgc

SEQ ID NO: 1876 - RNA, 23 nt, synthetic construct
  source 1..23: mol_type = other RNA
caggtctgtgaatatttgaatgt

SEQ ID NO: 1877 - RNA, 23 nt, synthetic construct
  source 1..23: mol_type = other RNA
tagatgtaagttgtaaattaagc

SEQ ID NO: 1878 - RNA, 23 nt, synthetic construct
  source 1..23: mol_type = other RNA
ggcaagtacatctgggaatcagc

SEQ ID NO: 1879 - RNA, 23 nt, synthetic construct
  source 1..23: mol_type = other RNA
gtgtggtatgtatttctggtggc

SEQ ID NO: 1880 - RNA, 23 nt, synthetic construct
  source 1..23: mol_type = other RNA
ggtaaaacctatatcactgaagg

SEQ ID NO: 1881 - RNA, 23 nt, synthetic construct
  source 1..23: mol_type = other RNA
aaaggtaaaacctatatcactga

SEQ ID NO: 1882 - RNA, 23 nt, synthetic construct
  source 1..23: mol_type = other RNA
tggtaagagaaaaggctagaagc

SEQ ID NO: 1883 - RNA, 23 nt, synthetic construct
  source 1..23: mol_type = other RNA
tgttggtaagagaaaaggctaga

SEQ ID NO: 1884 - RNA, 23 nt, synthetic construct
  source 1..23: mol_type = other RNA
ttaaggtagcaaataaaatatga

SEQ ID NO: 1885 - RNA, 23 nt, synthetic construct
  source 1..23: mol_type = other RNA
ggtaggaagatctactccaaggt

SEQ ID NO: 1886 - RNA, 23 nt, synthetic construct
  source 1..23: mol_type = other RNA
aggtaggaagatctactccaagg

SEQ ID NO: 1887 - RNA, 23 nt, synthetic construct
  source 1..23: mol_type = other RNA
ggtaaattggttgtgataaaagt

SEQ ID NO: 1888 - RNA, 23 nt, synthetic construct
  source 1..23: mol_type = other RNA
ggtagggcgacagatctaatagg

SEQ ID NO: 1889 - RNA, 23 nt, synthetic construct
  source 1..23: mol_type = other RNA
aaggtaatgaagcaacctctagc

SEQ ID NO: 1890 - RNA, 23 nt, synthetic construct
  source 1..23: mol_type = other RNA
gcaagtaagtcaggcatttccgc

SEQ ID NO: 1891 - RNA, 23 nt, synthetic construct
  source 1..23: mol_type = other RNA
ttaggtaggaaaagatgtggagc

SEQ ID NO: 1892 - RNA, 23 nt, synthetic construct
  source 1..23: mol_type = other RNA
caaggtaccgtctacttctttgc

SEQ ID NO: 1893 - RNA, 23 nt, synthetic construct
  source 1..23: mol_type = other RNA
ggtaagcacattgtaaacattgt

SEQ ID NO: 1894 - RNA, 23 nt, synthetic construct
  source 1..23: mol_type = other RNA
cgtcctgcaggcacagacacagc

SEQ ID NO: 1895 - RNA, 23 nt, synthetic construct
  source 1..23: mol_type = other RNA
tccacctgcaaatgtaagaaaga

SEQ ID NO: 1896 - RNA, 23 nt, synthetic construct
  source 1..23: mol_type = other RNA
gagccctaggacagagagacaga

SEQ ID NO: 1897 - RNA, 23 nt, synthetic construct
  source 1..23: mol_type = other RNA
gtcctggagccccaaggagcaga

SEQ ID NO: 1898 - RNA, 23 nt, synthetic construct
  source 1..23: mol_type = other RNA
cctggagggtgacacgccagggt

SEQ ID NO: 1899 - RNA, 23 nt, synthetic construct
  source 1..23: mol_type = other RNA
acctggagggtgacacgccaggg

SEQ ID NO: 1900 - RNA, 23 nt, synthetic construct
  source 1..23: mol_type = other RNA
cacctggagggtgacacgccagg

SEQ ID NO: 1901 - RNA, 23 nt, synthetic construct
  source 1..23: mol_type = other RNA
tcttctggaggaggaaagcaggt

SEQ ID NO: 1902 - RNA, 23 nt, synthetic construct
  source 1..23: mol_type = other RNA
ctcttctggaggaggaaagcagg

SEQ ID NO: 1903 - RNA, 23 nt, synthetic construct
  source 1..23: mol_type = other RNA
tctgcaaggggaggagagctggc

SEQ ID NO: 1904 - RNA, 23 nt, synthetic construct
  source 1..23: mol_type = other RNA
ctctgcaaggggaggagagctgg

SEQ ID NO: 1905 - RNA, 23 nt, synthetic construct
  source 1..23: mol_type = other RNA
ccgctctgcaaggggaggagagc

SEQ ID NO: 1906 - RNA, 23 nt, synthetic construct
  source 1..23: mol_type = other RNA
gtctggaaagcagagggagggga

SEQ ID NO: 1907 - RNA, 23 nt, synthetic construct
  source 1..23: mol_type = other RNA
tgtctggaaagcagagggagggg

SEQ ID NO: 1908 - RNA, 23 nt, synthetic construct
  source 1..23: mol_type = other RNA
atgtctggaaagcagagggaggg

SEQ ID NO: 1909 - RNA, 23 nt, synthetic construct
  source 1..23: mol_type = other RNA
gatgtctggaaagcagagggagg

SEQ ID NO: 1910 - RNA, 23 nt, synthetic construct
  source 1..23: mol_type = other RNA
ttctagacagcagcgggaagggt

SEQ ID NO: 1911 - RNA, 23 nt, synthetic construct
  source 1..23: mol_type = other RNA
gttctagacagcagcgggaaggg

SEQ ID NO: 1912 - RNA, 23 nt, synthetic construct
  source 1..23: mol_type = other RNA
agttctagacagcagcgggaagg

SEQ ID NO: 1913 - RNA, 23 nt, synthetic construct
  source 1..23: mol_type = other RNA
acctggaaggagacccagtgagc

SEQ ID NO: 1914 - RNA, 23 nt, synthetic construct
  source 1..23: mol_type = other RNA
gcacctggaaggagacccagtga

SEQ ID NO: 1915 - RNA, 23 nt, synthetic construct
  source 1..23: mol_type = other RNA
cctaagcagtgagcacaacaggt

SEQ ID NO: 1916 - RNA, 23 nt, synthetic construct
  source 1..23: mol_type = other RNA
tcctaagcagtgagcacaacagg

SEQ ID NO: 1917 - RNA, 23 nt, synthetic construct
  source 1..23: mol_type = other RNA
ccctgcaccagccagcagacagc

SEQ ID NO: 1918 - RNA, 23 nt, synthetic construct
  source 1..23: mol_type = other RNA
atctgggaggataaaggcaacgt

SEQ ID NO: 1919 - RNA, 23 nt, synthetic construct
  source 1..23: mol_type = other RNA
tctgagaggtcggaagagaaagc

SEQ ID NO: 1920 - RNA, 23 nt, synthetic construct
  source 1..23: mol_type = other RNA
gccctctgagaggtcggaagaga

SEQ ID NO: 1921 - RNA, 23 nt, synthetic construct
  source 1..23: mol_type = other RNA
tggactacaaaacaggagacggt

SEQ ID NO: 1922 - RNA, 23 nt, synthetic construct
  source 1..23: mol_type = other RNA
ttggactacaaaacaggagacgg

SEQ ID NO: 1923 - RNA, 23 nt, synthetic construct
  source 1..23: mol_type = other RNA
cggcctaggaggcagaagagaga

SEQ ID NO: 1924 - RNA, 23 nt, synthetic construct
  source 1..23: mol_type = other RNA
aactagatgaagaggagaaaaga

SEQ ID NO: 1925 - RNA, 23 nt, synthetic construct
  source 1..23: mol_type = other RNA
ccctgggggagaaaaggcagaga

SEQ ID NO: 1926 - RNA, 23 nt, synthetic construct
  source 1..23: mol_type = other RNA
taccctgggggagaaaaggcaga

SEQ ID NO: 1927 - RNA, 23 nt, synthetic construct
  source 1..23: mol_type = other RNA
ggtgagcagcgggctctgctggg

SEQ ID NO: 1928 - RNA, 23 nt, synthetic construct
  source 1..23: mol_type = other RNA
aggtgagcagcgggctctgctgg

SEQ ID NO: 1929 - RNA, 23 nt, synthetic construct
  source 1..23: mol_type = other RNA
gaaaggtgagcagcgggctctgc

SEQ ID NO: 1930 - RNA, 23 nt, synthetic construct
  source 1..23: mol_type = other RNA
ggtgagtcctcagcaccaggggc

SEQ ID NO: 1931 - RNA, 23 nt, synthetic construct
  source 1..23: mol_type = other RNA
gggtgagtcctcagcaccagggg

SEQ ID NO: 1932 - RNA, 23 nt, synthetic construct
  source 1..23: mol_type = other RNA
cgggtgagtcctcagcaccaggg

SEQ ID NO: 1933 - RNA, 23 nt, synthetic construct
  source 1..23: mol_type = other RNA
gcgggtgagtcctcagcaccagg

SEQ ID NO: 1934 - RNA, 23 nt, synthetic construct
  source 1..23: mol_type = other RNA
ggcaagtgttccacccccagggg

SEQ ID NO: 1935 - RNA, 23 nt, synthetic construct
  source 1..23: mol_type = other RNA
ggtgaggcgccttctggcctggg

SEQ ID NO: 1936 - RNA, 23 nt, synthetic construct
  source 1..23: mol_type = other RNA
aggtgaggcgccttctggcctgg

SEQ ID NO: 1937 - RNA, 23 nt, synthetic construct
  source 1..23: mol_type = other RNA
aggtgagcggcttcttcaccagc

SEQ ID NO: 1938 - RNA, 23 nt, synthetic construct
  source 1..23: mol_type = other RNA
agtggtaagttgtggggtttggc

SEQ ID NO: 1939 - RNA, 23 nt, synthetic construct
  source 1..23: mol_type = other RNA
cagtggtaagttgtggggtttgg

SEQ ID NO: 1940 - RNA, 23 nt, synthetic construct
  source 1..23: mol_type = other RNA
aggtgagtgtccctgctgggagc

SEQ ID NO: 1941 - RNA, 23 nt, synthetic construct
  source 1..23: mol_type = other RNA
gcaggtgagtgtccctgctggga

SEQ ID NO: 1942 - RNA, 23 nt, synthetic construct
  source 1..23: mol_type = other RNA
tgcaggtgagtgtccctgctggg

SEQ ID NO: 1943 - RNA, 23 nt, synthetic construct
  source 1..23: mol_type = other RNA
gaaggtaaatgagggcacccagc

SEQ ID NO: 1944 - RNA, 23 nt, synthetic construct
  source 1..23: mol_type = other RNA
ggtagttggcctgcttctggaga

SEQ ID NO: 1945 - RNA, 23 nt, synthetic construct
  source 1..23: mol_type = other RNA
gaggtagttggcctgcttctgga

SEQ ID NO: 1946 - RNA, 23 nt, synthetic construct
  source 1..23: mol_type = other RNA
agaggtagttggcctgcttctgg

SEQ ID NO: 1947 - RNA, 23 nt, synthetic construct
  source 1..23: mol_type = other RNA
gagggtaagtttgttgcctggga

SEQ ID NO: 1948 - RNA, 23 nt, synthetic construct
  source 1..23: mol_type = other RNA
tgagggtaagtttgttgcctggg

SEQ ID NO: 1949 - RNA, 23 nt, synthetic construct
  source 1..23: mol_type = other RNA
ggtaggagcacacccacccagga

SEQ ID NO: 1950 - RNA, 23 nt, synthetic construct
  source 1..23: mol_type = other RNA
aggtaggagcacacccacccagg

SEQ ID NO: 1951 - RNA, 23 nt, synthetic construct
  source 1..23: mol_type = other RNA
tgtgagtgctgggcctggggcgc

SEQ ID NO: 1952 - RNA, 23 nt, synthetic construct
  source 1..23: mol_type = other RNA
tttgtgagtgctgggcctggggc

SEQ ID NO: 1953 - RNA, 23 nt, synthetic construct
  source 1..23: mol_type = other RNA
atttgtgagtgctgggcctgggg

SEQ ID NO: 1954 - RNA, 23 nt, synthetic construct
  source 1..23: mol_type = other RNA
aatttgtgagtgctgggcctggg

SEQ ID NO: 1955 - RNA, 23 nt, synthetic construct
  source 1..23: mol_type = other RNA
aggtgaggggtgcaggcccaaga

SEQ ID NO: 1956 - RNA, 23 nt, synthetic construct
  source 1..23: mol_type = other RNA
tgtatgtccatgctgtggggcgc

SEQ ID NO: 1957 - RNA, 23 nt, synthetic construct
  source 1..23: mol_type = other RNA
catgtatgtccatgctgtggggc

SEQ ID NO: 1958 - RNA, 23 nt, synthetic construct
  source 1..23: mol_type = other RNA
gcatgtatgtccatgctgtgggg

SEQ ID NO: 1959 - RNA, 23 nt, synthetic construct
  source 1..23: mol_type = other RNA
agcatgtatgtccatgctgtggg

SEQ ID NO: 1960 - RNA, 23 nt, synthetic construct
  source 1..23: mol_type = other RNA
gaggtatagccagcaaccttggt

SEQ ID NO: 1961 - RNA, 23 nt, synthetic construct
  source 1..23: mol_type = other RNA
cgaggtatagccagcaaccttgg

SEQ ID NO: 1962 - RNA, 23 nt, synthetic construct
  source 1..23: mol_type = other RNA
caggttggtgaaagctcctgggc

SEQ ID NO: 1963 - RNA, 23 nt, synthetic construct
  source 1..23: mol_type = other RNA
acaggttggtgaaagctcctggg

SEQ ID NO: 1964 - RNA, 23 nt, synthetic construct
  source 1..23: mol_type = other RNA
aacaggttggtgaaagctcctgg

SEQ ID NO: 1965 - RNA, 23 nt, synthetic construct
  source 1..23: mol_type = other RNA
caaggtcagctccagcgtctaga

SEQ ID NO: 1966 - RNA, 23 nt, synthetic construct
  source 1..23: mol_type = other RNA
aaaggtacccgggttgtgctggc

SEQ ID NO: 1967 - RNA, 23 nt, synthetic construct
  source 1..23: mol_type = other RNA
gaaaggtacccgggttgtgctgg

SEQ ID NO: 1968 - RNA, 23 nt, synthetic construct
  source 1..23: mol_type = other RNA
ggctgcagaaggagagaagaggt

SEQ ID NO: 1969 - RNA, 23 nt, synthetic construct
  source 1..23: mol_type = other RNA
aggctgcagaaggagagaagagg

SEQ ID NO: 1970 - RNA, 23 nt, synthetic construct
  source 1..23: mol_type = other RNA
tcaggctgcagaaggagagaaga

SEQ ID NO: 1971 - RNA, 23 nt, synthetic construct
  source 1..23: mol_type = other RNA
ggcctgaatcacagggttgcagc

SEQ ID NO: 1972 - RNA, 23 nt, synthetic construct
  source 1..23: mol_type = other RNA
tctaagataggaggagaaggagg

SEQ ID NO: 1973 - RNA, 23 nt, synthetic construct
  source 1..23: mol_type = other RNA
aatctaagataggaggagaagga

SEQ ID NO: 1974 - RNA, 23 nt, synthetic construct
  source 1..23: mol_type = other RNA
caatctaagataggaggagaagg

SEQ ID NO: 1975 - RNA, 23 nt, synthetic construct
  source 1..23: mol_type = other RNA
tctctgtggccggcagggagagg

SEQ ID NO: 1976 - RNA, 23 nt, synthetic construct
  source 1..23: mol_type = other RNA
ctctgtggccggcagggagagga

SEQ ID NO: 1977 - RNA, 23 nt, synthetic construct
  source 1..23: mol_type = other RNA
catctctgtggccggcagggaga

SEQ ID NO: 1978 - RNA, 23 nt, synthetic construct
  source 1..23: mol_type = other RNA
tctgcagagaagatgggatcggg

SEQ ID NO: 1979 - RNA, 23 nt, synthetic construct
  source 1..23: mol_type = other RNA
ttctgcagagaagatgggatcgg

SEQ ID NO: 1980 - RNA, 23 nt, synthetic construct
  source 1..23: mol_type = other RNA
actacgggtggaaaacagcctgg

SEQ ID NO: 1981 - RNA, 23 nt, synthetic construct
  source 1..23: mol_type = other RNA
ccatactacgggtggaaaacagc

SEQ ID NO: 1982 - RNA, 23 nt, synthetic construct
  source 1..23: mol_type = other RNA
cctgggaagggaagaagatgggg

SEQ ID NO: 1983 - RNA, 23 nt, synthetic construct
  source 1..23: mol_type = other RNA
gcctgggaagggaagaagatggg

SEQ ID NO: 1984 - RNA, 23 nt, synthetic construct
  source 1..23: mol_type = other RNA
ggcctgggaagggaagaagatgg

SEQ ID NO: 1985 - RNA, 23 nt, synthetic construct
  source 1..23: mol_type = other RNA
gtacctgtagggtgggcggtgga

SEQ ID NO: 1986 - RNA, 23 nt, synthetic construct
  source 1..23: mol_type = other RNA
ggtacctgtagggtgggcggtgg

SEQ ID NO: 1987 - RNA, 23 nt, synthetic construct
  source 1..23: mol_type = other RNA
cctgggggagggaaacaaggaga

SEQ ID NO: 1988 - RNA, 23 nt, synthetic construct
  source 1..23: mol_type = other RNA
ttcctgggggagggaaacaagga

SEQ ID NO: 1989 - RNA, 23 nt, synthetic construct
  source 1..23: mol_type = other RNA
attcctgggggagggaaacaagg

SEQ ID NO: 1990 - RNA, 23 nt, synthetic construct
  source 1..23: mol_type = other RNA
tctgtttcagagcaaagctgagg

SEQ ID NO: 1991 - RNA, 23 nt, synthetic construct
  source 1..23: mol_type = other RNA
aatctgtttcagagcaaagctga

SEQ ID NO: 1992 - RNA, 23 nt, synthetic construct
  source 1..23: mol_type = other RNA
ctcctaggcgggagacagggggc

SEQ ID NO: 1993 - RNA, 23 nt, synthetic construct
  source 1..23: mol_type = other RNA
gctcctaggcgggagacaggggg

SEQ ID NO: 1994 - RNA, 23 nt, synthetic construct
  source 1..23: mol_type = other RNA
agctcctaggcgggagacagggg

SEQ ID NO: 1995 - RNA, 23 nt, synthetic construct
  source 1..23: mol_type = other RNA
cctgtggcgggaaagagaggaga

SEQ ID NO: 1996 - RNA, 23 nt, synthetic construct
  source 1..23: mol_type = other RNA
accctgtggcgggaaagagagga

SEQ ID NO: 1997 - RNA, 23 nt, synthetic construct
  source 1..23: mol_type = other RNA
aaccctgtggcgggaaagagagg

SEQ ID NO: 1998 - RNA, 23 nt, synthetic construct
  source 1..23: mol_type = other RNA
aggtaagcaggcgaaatgtggga

SEQ ID NO: 1999 - RNA, 23 nt, synthetic construct
  source 1..23: mol_type = other RNA
aaggtaagcaggcgaaatgtggg

SEQ ID NO: 2000 - RNA, 23 nt, synthetic construct
  source 1..23: mol_type = other RNA
aaaggtaagcaggcgaaatgtgg

SEQ ID NO: 2001 - RNA, 23 nt, synthetic construct
  source 1..23: mol_type = other RNA
aggtagaagccggggcaaggtgc

SEQ ID NO: 2002 - RNA, 23 nt, synthetic construct
  source 1..23: mol_type = other RNA
gcaggtagaagccggggcaaggt

SEQ ID NO: 2003 - RNA, 23 nt, synthetic construct
  source 1..23: mol_type = other RNA
agcaggtagaagccggggcaagg

SEQ ID NO: 2004 - RNA, 23 nt, synthetic construct
  source 1..23: mol_type = other RNA
aaggtgagtcaccacccccagga

SEQ ID NO: 2005 - RNA, 23 nt, synthetic construct
  source 1..23: mol_type = other RNA
gaaggtgagtcaccacccccagg

SEQ ID NO: 2006 - RNA, 23 nt, synthetic construct
  source 1..23: mol_type = other RNA
ggtgaggtgcccggggagggtgg

SEQ ID NO: 2007 - RNA, 23 nt, synthetic construct
  source 1..23: mol_type = other RNA
aaggtgaggtgcccggggagggt

SEQ ID NO: 2008 - RNA, 23 nt, synthetic construct
  source 1..23: mol_type = other RNA
aaaggtgaggtgcccggggaggg

SEQ ID NO: 2009 - RNA, 23 nt, synthetic construct
  source 1..23: mol_type = other RNA
caaaggtgaggtgcccggggagg

SEQ ID NO: 2010 - RNA, 23 nt, synthetic construct
  source 1..23: mol_type = other RNA
aggtaagaaagcacctgggtgga

SEQ ID NO: 2011 - RNA, 23 nt, synthetic construct
  source 1..23: mol_type = other RNA
caggtaagaaagcacctgggtgg

SEQ ID NO: 2012 - RNA, 23 nt, synthetic construct
  source 1..23: mol_type = other RNA
tgcaggtaagaaagcacctgggt

SEQ ID NO: 2013 - RNA, 23 nt, synthetic construct
  source 1..23: mol_type = other RNA
agacggtgagttccctttggtgc

SEQ ID NO: 2014 - RNA, 23 nt, synthetic construct
  source 1..23: mol_type = other RNA
ctgtgagtgtccctcagggcaga

SEQ ID NO: 2015 - RNA, 23 nt, synthetic construct
  source 1..23: mol_type = other RNA
aaactgtgagtgtccctcagggc

SEQ ID NO: 2016 - RNA, 23 nt, synthetic construct
  source 1..23: mol_type = other RNA
ggtgaggccgcccctggctgggg

SEQ ID NO: 2017 - RNA, 23 nt, synthetic construct
  source 1..23: mol_type = other RNA
aggtgaggccgcccctggctggg

SEQ ID NO: 2018 - RNA, 23 nt, synthetic construct
  source 1..23: mol_type = other RNA
caggtgaggccgcccctggctgg

SEQ ID NO: 2019 - RNA, 23 nt, synthetic construct
  source 1..23: mol_type = other RNA
gcggttagaacccccttccctgt

SEQ ID NO: 2020 - RNA, 23 nt, synthetic construct
  source 1..23: mol_type = other RNA
ggtgaggcccaggcaggatccgc

SEQ ID NO: 2021 - RNA, 23 nt, synthetic construct
  source 1..23: mol_type = other RNA
ggtactgcttgtccccggcaggc

SEQ ID NO: 2022 - RNA, 23 nt, synthetic construct
  source 1..23: mol_type = other RNA
aggtactgcttgtccccggcagg

SEQ ID NO: 2023 - RNA, 23 nt, synthetic construct
  source 1..23: mol_type = other RNA
accaggtactgcttgtccccggc

SEQ ID NO: 2024 - RNA, 23 nt, synthetic construct
  source 1..23: mol_type = other RNA
tcctgaatgggaagaaaagaggt

SEQ ID NO: 2025 - RNA, 23 nt, synthetic construct
  source 1..23: mol_type = other RNA
ttcctgaatgggaagaaaagagg

SEQ ID NO: 2026 - RNA, 23 nt, synthetic construct
  source 1..23: mol_type = other RNA
tgttcctgaatgggaagaaaaga

SEQ ID NO: 2027 - RNA, 23 nt, synthetic construct
  source 1..23: mol_type = other RNA
cctgtgaactcacagagagaaga

SEQ ID NO: 2028 - RNA, 23 nt, synthetic construct
  source 1..23: mol_type = other RNA
caacctgtgaactcacagagaga

SEQ ID NO: 2029 - RNA, 23 nt, synthetic construct
  source 1..23: mol_type = other RNA
acctagatgaaatgaacagtaga

SEQ ID NO: 2030 - RNA, 23 nt, synthetic construct
  source 1..23: mol_type = other RNA
tacacctagatgaaatgaacagt

SEQ ID NO: 2031 - RNA, 23 nt, synthetic construct
  source 1..23: mol_type = other RNA
gactgaaaagagagcgttgacgc

SEQ ID NO: 2032 - RNA, 23 nt, synthetic construct
  source 1..23: mol_type = other RNA
gcagactgaaaagagagcgttga

SEQ ID NO: 2033 - RNA, 23 nt, synthetic construct
  source 1..23: mol_type = other RNA
tggtaagttgtgaatttcttagc

SEQ ID NO: 2034 - RNA, 23 nt, synthetic construct
  source 1..23: mol_type = other RNA
ggtgagtacaattcaaggtgtgt

SEQ ID NO: 2035 - RNA, 23 nt, synthetic construct
  source 1..23: mol_type = other RNA
ccggtgagtacaattcaaggtgt

SEQ ID NO: 2036 - RNA, 23 nt, synthetic construct
  source 1..23: mol_type = other RNA
taccggtgagtacaattcaaggt

SEQ ID NO: 2037 - RNA, 23 nt, synthetic construct
  source 1..23: mol_type = other RNA
ggcgagtatgcatggaaaatcgc

SEQ ID NO: 2038 - RNA, 23 nt, synthetic construct
  source 1..23: mol_type = other RNA
ggtatgtagcatatgtaagaagg

SEQ ID NO: 2039 - RNA, 23 nt, synthetic construct
  source 1..23: mol_type = other RNA
actggtatgtagcatatgtaaga

SEQ ID NO: 2040 - RNA, 23 nt, synthetic construct
  source 1..23: mol_type = other RNA
taaggtaactcatgagattatga

SEQ ID NO: 2041 - RNA, 23 nt, synthetic construct
  source 1..23: mol_type = other RNA
atcctggccccatgcaaggagga

SEQ ID NO: 2042 - RNA, 23 nt, synthetic construct
  source 1..23: mol_type = other RNA
gatcctggccccatgcaaggagg

SEQ ID NO: 2043 - RNA, 23 nt, synthetic construct
  source 1..23: mol_type = other RNA
cctgcagaagccagagaggccgg

SEQ ID NO: 2044 - RNA, 23 nt, synthetic construct
  source 1..23: mol_type = other RNA
aggcctgcagaagccagagaggc

SEQ ID NO: 2045 - RNA, 23 nt, synthetic construct
  source 1..23: mol_type = other RNA
aaggcctgcagaagccagagagg

SEQ ID NO: 2046 - RNA, 23 nt, synthetic construct
  source 1..23: mol_type = other RNA
tctttccaaggcgacatttgtgg

SEQ ID NO: 2047 - RNA, 23 nt, synthetic construct
  source 1..23: mol_type = other RNA
cgtctttccaaggcgacatttgt

SEQ ID NO: 2048 - RNA, 23 nt, synthetic construct
  source 1..23: mol_type = other RNA
ggcctgctcgacgaacacaagga

SEQ ID NO: 2049 - RNA, 23 nt, synthetic construct
  source 1..23: mol_type = other RNA
tggcctgctcgacgaacacaagg

SEQ ID NO: 2050 - RNA, 23 nt, synthetic construct
  source 1..23: mol_type = other RNA
cctgggaggaacaaagccaaggt

SEQ ID NO: 2051 - RNA, 23 nt, synthetic construct
  source 1..23: mol_type = other RNA
gcctgggaggaacaaagccaagg

SEQ ID NO: 2052 - RNA, 23 nt, synthetic construct
  source 1..23: mol_type = other RNA
cctggaaaggtgaggaggtgggt

SEQ ID NO: 2053 - RNA, 23 nt, synthetic construct
  source 1..23: mol_type = other RNA
acctggaaaggtgaggaggtggg

SEQ ID NO: 2054 - RNA, 23 nt, synthetic construct
  source 1..23: mol_type = other RNA
gacctggaaaggtgaggaggtgg

SEQ ID NO: 2055 - RNA, 23 nt, synthetic construct
  source 1..23: mol_type = other RNA
atgacctggaaaggtgaggaggt

SEQ ID NO: 2056 - RNA, 23 nt, synthetic construct
  source 1..23: mol_type = other RNA
cctggtgcaggggtgaatggtga

SEQ ID NO: 2057 - RNA, 23 nt, synthetic construct
  source 1..23: mol_type = other RNA
tgcctggtgcaggggtgaatggt

SEQ ID NO: 2058 - RNA, 23 nt, synthetic construct
  source 1..23: mol_type = other RNA
atgcctggtgcaggggtgaatgg

SEQ ID NO: 2059 - RNA, 23 nt, synthetic construct
  source 1..23: mol_type = other RNA
tgggccttagagtcaaagacgga

SEQ ID NO: 2060 - RNA, 23 nt, synthetic construct
  source 1..23: mol_type = other RNA
gcctggggcagaggaaagccagc

SEQ ID NO: 2061 - RNA, 23 nt, synthetic construct
  source 1..23: mol_type = other RNA
cctgccagagcccgaggaaaaga

SEQ ID NO: 2062 - RNA, 23 nt, synthetic construct
  source 1..23: mol_type = other RNA
ggtgcgggtgtagggatgggagg

SEQ ID NO: 2063 - RNA, 23 nt, synthetic construct
  source 1..23: mol_type = other RNA
aaggtgcgggtgtagggatggga

SEQ ID NO: 2064 - RNA, 23 nt, synthetic construct
  source 1..23: mol_type = other RNA
caaggtgcgggtgtagggatggg

SEQ ID NO: 2065 - RNA, 23 nt, synthetic construct
  source 1..23: mol_type = other RNA
ccaaggtgcgggtgtagggatgg

SEQ ID NO: 2066 - RNA, 23 nt, synthetic construct
  source 1..23: mol_type = other RNA
cccggtaagacccccatctgtgc

SEQ ID NO: 2067 - RNA, 23 nt, synthetic construct
  source 1..23: mol_type = other RNA
ggtaagcacggccgtctgatggg

SEQ ID NO: 2068 - RNA, 23 nt, synthetic construct
  source 1..23: mol_type = other RNA
aggtaagcacggccgtctgatgg

SEQ ID NO: 2069 - RNA, 23 nt, synthetic construct
  source 1..23: mol_type = other RNA
gacaggtaagcacggccgtctga

SEQ ID NO: 2070 - RNA, 23 nt, synthetic construct
  source 1..23: mol_type = other RNA
aggtaagtgatggccccagacgc

SEQ ID NO: 2071 - RNA, 23 nt, synthetic construct
  source 1..23: mol_type = other RNA
cataggtaagtgatggccccaga

SEQ ID NO: 2072 - RNA, 23 nt, synthetic construct
  source 1..23: mol_type = other RNA
gaggtaggtgctggggctgctgc

SEQ ID NO: 2073 - RNA, 23 nt, synthetic construct
  source 1..23: mol_type = other RNA
ctggtaagtcaccaccccactgc

SEQ ID NO: 2074 - RNA, 23 nt, synthetic construct
  source 1..23: mol_type = other RNA
ggtaagcaggatggcagggtggg

SEQ ID NO: 2075 - RNA, 23 nt, synthetic construct
  source 1..23: mol_type = other RNA
aggtaagcaggatggcagggtgg

SEQ ID NO: 2076 - RNA, 23 nt, synthetic construct
  source 1..23: mol_type = other RNA
gcaggtaagcaggatggcagggt

SEQ ID NO: 2077 - RNA, 23 nt, synthetic construct
  source 1..23: mol_type = other RNA
ggcaggtaagcaggatggcaggg

SEQ ID NO: 2078 - RNA, 23 nt, synthetic construct
  source 1..23: mol_type = other RNA
aggtgactgtacccctccttcgt

SEQ ID NO: 2079 - RNA, 23 nt, synthetic construct
  source 1..23: mol_type = other RNA
cacaggtaggaggctgggcttgc

SEQ ID NO: 2080 - RNA, 23 nt, synthetic construct
  source 1..23: mol_type = other RNA
ggtgaagaggcccgtgaggccgg

SEQ ID NO: 2081 - RNA, 23 nt, synthetic construct
  source 1..23: mol_type = other RNA
gcaggtgaagaggcccgtgaggc

SEQ ID NO: 2082 - RNA, 23 nt, synthetic construct
  source 1..23: mol_type = other RNA
agcaggtgaagaggcccgtgagg

SEQ ID NO: 2083 - RNA, 23 nt, synthetic construct
  source 1..23: mol_type = other RNA
gtctgagagatggagagaggtga

SEQ ID NO: 2084 - RNA, 23 nt, synthetic construct
  source 1..23: mol_type = other RNA
gagtctgagagatggagagaggt

SEQ ID NO: 2085 - RNA, 23 nt, synthetic construct
  source 1..23: mol_type = other RNA
ggagtctgagagatggagagagg

SEQ ID NO: 2086 - RNA, 23 nt, synthetic construct
  source 1..23: mol_type = other RNA
tctctctggaagggcacaaaggt

SEQ ID NO: 2087 - RNA, 23 nt, synthetic construct
  source 1..23: mol_type = other RNA
cctgcagagaaacacacttgggg

SEQ ID NO: 2088 - RNA, 23 nt, synthetic construct
  source 1..23: mol_type = other RNA
ccctgcagagaaacacacttggg

SEQ ID NO: 2089 - RNA, 23 nt, synthetic construct
  source 1..23: mol_type = other RNA
tccctgcagagaaacacacttgg

SEQ ID NO: 2090 - RNA, 23 nt, synthetic construct
  source 1..23: mol_type = other RNA
ttctttgaggagaaagggagagg

SEQ ID NO: 2091 - RNA, 23 nt, synthetic construct
  source 1..23: mol_type = other RNA
ccttctttgaggagaaagggaga

SEQ ID NO: 2092 - RNA, 23 nt, synthetic construct
  source 1..23: mol_type = other RNA
ggtaggtggggtcggcggtcagg

SEQ ID NO: 2093 - RNA, 23 nt, synthetic construct
  source 1..23: mol_type = other RNA
cttaggtaggtggggtcggcggt

SEQ ID NO: 2094 - RNA, 23 nt, synthetic construct
  source 1..23: mol_type = other RNA
ggtgcggcctcggaggccccggg

SEQ ID NO: 2095 - RNA, 23 nt, synthetic construct
  source 1..23: mol_type = other RNA
aggtgcggcctcggaggccccgg

SEQ ID NO: 2096 - RNA, 23 nt, synthetic construct
  source 1..23: mol_type = other RNA
agcctggaagagaaaggaaaggc

SEQ ID NO: 2097 - RNA, 23 nt, synthetic construct
  source 1..23: mol_type = other RNA
cagcctggaagagaaaggaaagg

SEQ ID NO: 2098 - RNA, 23 nt, synthetic construct
  source 1..23: mol_type = other RNA
tctgtccaaaagagaagacaggc

SEQ ID NO: 2099 - RNA, 23 nt, synthetic construct
  source 1..23: mol_type = other RNA
atctgtccaaaagagaagacagg

SEQ ID NO: 2100 - RNA, 23 nt, synthetic construct
  source 1..23: mol_type = other RNA
gtgctgaaataaagaaaaagggg

SEQ ID NO: 2101 - RNA, 23 nt, synthetic construct
  source 1..23: mol_type = other RNA
tgtgctgaaataaagaaaaaggg

SEQ ID NO: 2102 - RNA, 23 nt, synthetic construct
  source 1..23: mol_type = other RNA
ttgtgctgaaataaagaaaaagg

SEQ ID NO: 2103 - RNA, 23 nt, synthetic construct
  source 1..23: mol_type = other RNA
acctgggaagaagccacatgtgt

SEQ ID NO: 2104 - RNA, 23 nt, synthetic construct
  source 1..23: mol_type = other RNA
ggacctgggaagaagccacatgt

SEQ ID NO: 2105 - RNA, 23 nt, synthetic construct
  source 1..23: mol_type = other RNA
acctacagtgtaggggagagaga

SEQ ID NO: 2106 - RNA, 23 nt, synthetic construct
  source 1..23: mol_type = other RNA
agacctacagtgtaggggagaga

SEQ ID NO: 2107 - RNA, 23 nt, synthetic construct
  source 1..23: mol_type = other RNA
gaggtaagcctctggtttattga

SEQ ID NO: 2108 - RNA, 23 nt, synthetic construct
  source 1..23: mol_type = other RNA
ggtaggccttgagagagagcagt

SEQ ID NO: 2109 - RNA, 23 nt, synthetic construct
  source 1..23: mol_type = other RNA
gaaggtaggccttgagagagagc

SEQ ID NO: 2110 - RNA, 23 nt, synthetic construct
  source 1..23: mol_type = other RNA
cctagagtgaagagattcattgg

SEQ ID NO: 2111 - RNA, 23 nt, synthetic construct
  source 1..23: mol_type = other RNA
tctgatggggaaacaaaacaagg

SEQ ID NO: 2112 - RNA, 23 nt, synthetic construct
  source 1..23: mol_type = other RNA
ggtgagtggtccccagcccgggc

SEQ ID NO: 2113 - RNA, 23 nt, synthetic construct
  source 1..23: mol_type = other RNA
gggtgagtggtccccagcccggg

SEQ ID NO: 2114 - RNA, 23 nt, synthetic construct
  source 1..23: mol_type = other RNA
cgggtgagtggtccccagcccgg

SEQ ID NO: 2115 - RNA, 23 nt, synthetic construct
  source 1..23: mol_type = other RNA
gaggtgagttaaggtcattttga

SEQ ID NO: 2116 - RNA, 23 nt, synthetic construct
  source 1..23: mol_type = other RNA
ggtaagttagagctagtgctaga

SEQ ID NO: 2117 - RNA, 23 nt, synthetic construct
  source 1..23: mol_type = other RNA
ggcaggtaagttagagctagtgc

SEQ ID NO: 2118 - RNA, 23 nt, synthetic construct
  source 1..23: mol_type = other RNA
ccaggtaagggcagctttggtgc

SEQ ID NO: 2119 - RNA, 23 nt, synthetic construct
  source 1..23: mol_type = other RNA
ggtaagacaggggtctagcctgg

SEQ ID NO: 2120 - RNA, 23 nt, synthetic construct
  source 1..23: mol_type = other RNA
aacaggtaagacaggggtctagc

SEQ ID NO: 2121 - RNA, 23 nt, synthetic construct
  source 1..23: mol_type = other RNA
ccctgggtgtagagaagacacgt

SEQ ID NO: 2122 - RNA, 23 nt, synthetic construct
  source 1..23: mol_type = other RNA
cctataaggtgtgaaagtctgga

SEQ ID NO: 2123 - RNA, 23 nt, synthetic construct
  source 1..23: mol_type = other RNA
tcctataaggtgtgaaagtctgg

SEQ ID NO: 2124 - RNA, 23 nt, synthetic construct
  source 1..23: mol_type = other RNA
acctatgagagaagacagacaga

SEQ ID NO: 2125 - RNA, 23 nt, synthetic construct
  source 1..23: mol_type = other RNA
ggtgagtatacagaccttcgagg

SEQ ID NO: 2126 - RNA, 23 nt, synthetic construct
  source 1..23: mol_type = other RNA
gaggtgagtatacagaccttcga

SEQ ID NO: 2127 - RNA, 23 nt, synthetic construct
  source 1..23: mol_type = other RNA
accactgaggacagaaagagagc

SEQ ID NO: 2128 - RNA, 23 nt, synthetic construct
  source 1..23: mol_type = other RNA
caccactgcatgagaggcgatga

SEQ ID NO: 2129 - RNA, 23 nt, synthetic construct
  source 1..23: mol_type = other RNA
aatctggaaaggaaggaagcaga

SEQ ID NO: 2130 - RNA, 23 nt, synthetic construct
  source 1..23: mol_type = other RNA
tctgcaatgggtagggagagaga

SEQ ID NO: 2131 - RNA, 23 nt, synthetic construct
  source 1..23: mol_type = other RNA
ggtctgcaatgggtagggagaga

SEQ ID NO: 2132 - RNA, 23 nt, synthetic construct
  source 1..23: mol_type = other RNA
ttggtctgcaatgggtagggaga

SEQ ID NO: 2133 - RNA, 23 nt, synthetic construct
  source 1..23: mol_type = other RNA
ggtaagcggtcgtgccctgctgg

SEQ ID NO: 2134 - RNA, 23 nt, synthetic construct
  source 1..23: mol_type = other RNA
caaggtaagcggtcgtgccctgc

SEQ ID NO: 2135 - RNA, 23 nt, synthetic construct
  source 1..23: mol_type = other RNA
ggtgagtccccctggctgttgga

SEQ ID NO: 2136 - RNA, 23 nt, synthetic construct
  source 1..23: mol_type = other RNA
aggtgagtccccctggctgttgg

SEQ ID NO: 2137 - RNA, 23 nt, synthetic construct
  source 1..23: mol_type = other RNA
cgaaggtgagtccccctggctgt

SEQ ID NO: 2138 - RNA, 23 nt, synthetic construct
  source 1..23: mol_type = other RNA
ggtgggcatctttgggaagtggg

SEQ ID NO: 2139 - RNA, 23 nt, synthetic construct
  source 1..23: mol_type = other RNA
aggtgggcatctttgggaagtgg

SEQ ID NO: 2140 - RNA, 23 nt, synthetic construct
  source 1..23: mol_type = other RNA
gcaggtgggcatctttgggaagt

SEQ ID NO: 2141 - RNA, 23 nt, synthetic construct
  source 1..23: mol_type = other RNA
gcaggtgaggatgtagtcacgga

SEQ ID NO: 2142 - RNA, 23 nt, synthetic construct
  source 1..23: mol_type = other RNA
tgcaggtgaggatgtagtcacgg

SEQ ID NO: 2143 - RNA, 23 nt, synthetic construct
  source 1..23: mol_type = other RNA
aagtaagtggccctgactttagc

SEQ ID NO: 2144 - RNA, 23 nt, synthetic construct
  source 1..23: mol_type = other RNA
aggttggttcccagagggcaagc

SEQ ID NO: 2145 - RNA, 23 nt, synthetic construct
  source 1..23: mol_type = other RNA
actttatcaaaagggaaaaaaga

SEQ ID NO: 2146 - RNA, 23 nt, synthetic construct
  source 1..23: mol_type = other RNA
tctgtaaggacagtgtaaaaagg

SEQ ID NO: 2147 - RNA, 23 nt, synthetic construct
  source 1..23: mol_type = other RNA
ggtaaaacctatatcactgaagg

SEQ ID NO: 2148 - RNA, 23 nt, synthetic construct
  source 1..23: mol_type = other RNA
aaaggtaaaacctatatcactga

SEQ ID NO: 2149 - RNA, 23 nt, synthetic construct
  source 1..23: mol_type = other RNA
tggtaagagaaaaggctagaagc

SEQ ID NO: 2150 - RNA, 23 nt, synthetic construct
  source 1..23: mol_type = other RNA
tgttggtaagagaaaaggctaga

SEQ ID NO: 2151 - RNA, 23 nt, synthetic construct
  source 1..23: mol_type = other RNA
ttaaggtagcaaataaaatatga

SEQ ID NO: 2152 - RNA, 23 nt, synthetic construct
  source 1..23: mol_type = other RNA
ggtaggaagatctactccaaggt

SEQ ID NO: 2153 - RNA, 23 nt, synthetic construct
  source 1..23: mol_type = other RNA
aggtaggaagatctactccaagg

SEQ ID NO: 2154 - RNA, 23 nt, synthetic construct
  source 1..23: mol_type = other RNA
ggtagggcgacagatctaatagg

SEQ ID NO: 2155 - RNA, 23 nt, synthetic construct
  source 1..23: mol_type = other RNA
ttaggtaggaaaagatgtggagc

SEQ ID NO: 2156 - RNA, 23 nt, synthetic construct
  source 1..23: mol_type = other RNA
ggtaagcacattgtaaacattgt

SEQ ID NO: 2157 - RNA, 23 nt, synthetic construct
  source 1..23: mol_type = other RNA
tgctgtcttaggttggatgttga

SEQ ID NO: 2158 - RNA, 23 nt, synthetic construct
  source 1..23: mol_type = other RNA
aaagcaagtaagtccttatttgt

SEQ ID NO: 2159 - RNA, 23 nt, synthetic construct
  source 1..23: mol_type = other RNA
aacttaaggtcagattattttgc

SEQ ID NO: 2160 - RNA, 23 nt, synthetic construct
  source 1..23: mol_type = other RNA
actggccgtatgtactttctagc

SEQ ID NO: 2161 - RNA, 23 nt, synthetic construct
  source 1..23: mol_type = other RNA
gaaaaggtgagagcatcttaagc

SEQ ID NO: 2162 - RNA, 23 nt, synthetic construct
  source 1..23: mol_type = other RNA
ctacagacaagtaagtaaaaagc

SEQ ID NO: 2163 - RNA, 23 nt, synthetic construct
  source 1..23: mol_type = other RNA
tgaagaggtatgaagataagtga

SEQ ID NO: 2164 - RNA, 23 nt, synthetic construct
  source 1..23: mol_type = other RNA
catgaagaggtatgaagataagt

SEQ ID NO: 2165 - RNA, 23 nt, synthetic construct
  source 1..23: mol_type = other RNA
gcaaaggtgtgtgcatgctgaga

SEQ ID NO: 2166 - RNA, 23 nt, synthetic construct
  source 1..23: mol_type = other RNA
gagcaaaggtgtgtgcatgctga

SEQ ID NO: 2167 - RNA, 23 nt, synthetic construct
  source 1..23: mol_type = other RNA
ttaaggtagcaaataaaatatga

SEQ ID NO: 2168 - RNA, 23 nt, synthetic construct
  source 1..23: mol_type = other RNA
aataaaggtaatgttgttttaga

SEQ ID NO: 2169 - RNA, 23 nt, synthetic construct
  source 1..23: mol_type = other RNA
cattaggtaggaaaagatgtgga

SEQ ID NO: 2170 - RNA, 23 nt, synthetic construct
  source 1..23: mol_type = other RNA
acattaggtaggaaaagatgtgg

SEQ ID NO: 2171 - RNA, 23 nt, synthetic construct
  source 1..23: mol_type = other RNA
caacattaggtaggaaaagatgt

SEQ ID NO: 2172 - RNA, 23 nt, synthetic construct
  source 1..23: mol_type = other RNA
gcttctgcaggtaagcacattgt

SEQ ID NO: 2173 - RNA, 23 nt, synthetic construct
  source 1..23: mol_type = other RNA
actttatcaaaagggaaaaaaga

SEQ ID NO: 2174 - RNA, 23 nt, synthetic construct
  source 1..23: mol_type = other RNA
tctgtaaggacagtgtaaaaagg

SEQ ID NO: 2175 - RNA, 23 nt, synthetic construct
  source 1..23: mol_type = other RNA
accttaagttgttcttccaaagc

SEQ ID NO: 2176 - RNA, 23 nt, synthetic construct
  source 1..23: mol_type = other RNA
acctttccccaggcaacttcaga

SEQ ID NO: 2177 - RNA, 23 nt, synthetic construct
  source 1..23: mol_type = other RNA
tacctttccagtcttaattctgt

SEQ ID NO: 2178 - RNA, 23 nt, synthetic construct
  source 1..23: mol_type = other RNA
acctgcagaagcttccatctggt

SEQ ID NO: 2179 - RNA, 23 nt, synthetic construct
  source 1..23: mol_type = other RNA
tacctgcagaagcttccatctgg

SEQ ID NO: 2180 - RNA, 23 nt, synthetic construct
  source 1..23: mol_type = other RNA
aggctacaggcaatcctgggtgt

SEQ ID NO: 2181 - RNA, 23 nt, synthetic construct
  source 1..23: mol_type = other RNA
cctgcaggctgtacagggcctgc

SEQ ID NO: 2182 - RNA, 23 nt, synthetic construct
  source 1..23: mol_type = other RNA
gctgtacagggcctgctagtggc

SEQ ID NO: 2183 - RNA, 23 nt, synthetic construct
  source 1..23: mol_type = other RNA
ggctgtacagggcctgctagtgg

SEQ ID NO: 2184 - RNA, 23 nt, synthetic construct
  source 1..23: mol_type = other RNA
tggcccagggcagggctgatagc

SEQ ID NO: 2185 - RNA, 23 nt, synthetic construct
  source 1..23: mol_type = other RNA
tagccaggcccagctgctgctgt

SEQ ID NO: 2186 - RNA, 23 nt, synthetic construct
  source 1..23: mol_type = other RNA
tgatagccaggcccagctgctgc

SEQ ID NO: 2187 - RNA, 23 nt, synthetic construct
  source 1..23: mol_type = other RNA
gcccagctgctgctgtccacggt

SEQ ID NO: 2188 - RNA, 23 nt, synthetic construct
  source 1..23: mol_type = other RNA
ggcccagctgctgctgtccacgg

SEQ ID NO: 2189 - RNA, 23 nt, synthetic construct
  source 1..23: mol_type = other RNA
tgaagcagccgtttgtgcagggc

SEQ ID NO: 2190 - RNA, 23 nt, synthetic construct
  source 1..23: mol_type = other RNA
ctgaagcagccgtttgtgcaggg

SEQ ID NO: 2191 - RNA, 23 nt, synthetic construct
  source 1..23: mol_type = other RNA
cctgaagcagccgtttgtgcagg

SEQ ID NO: 2192 - RNA, 23 nt, synthetic construct
  source 1..23: mol_type = other RNA
catgcaggctgtgacaggatgga

SEQ ID NO: 2193 - RNA, 23 nt, synthetic construct
  source 1..23: mol_type = other RNA
tcatgcaggctgtgacaggatgg

SEQ ID NO: 2194 - RNA, 23 nt, synthetic construct
  source 1..23: mol_type = other RNA
gagcagctggcaaaggccaatgc

SEQ ID NO: 2195 - RNA, 23 nt, synthetic construct
  source 1..23: mol_type = other RNA
attcaggccaagacatcccctgt

SEQ ID NO: 2196 - RNA, 23 nt, synthetic construct
  source 1..23: mol_type = other RNA
ctacaggaccagctggtgctagt

SEQ ID NO: 2197 - RNA, 23 nt, synthetic construct
  source 1..23: mol_type = other RNA
ggccctacaggaccagctggtgc

SEQ ID NO: 2198 - RNA, 23 nt, synthetic construct
  source 1..23: mol_type = other RNA
gaccagctggtgctagtcgctgc

SEQ ID NO: 2199 - RNA, 23 nt, synthetic construct
  source 1..23: mol_type = other RNA
caggaccagctggtgctagtcgc

SEQ ID NO: 2200 - RNA, 23 nt, synthetic construct
  source 1..23: mol_type = other RNA
gccccatagctcactgtgcatgc

SEQ ID NO: 2201 - RNA, 23 nt, synthetic construct
  source 1..23: mol_type = other RNA
ccacgccccatagctcactgtgc

SEQ ID NO: 2202 - RNA, 23 nt, synthetic construct
  source 1..23: mol_type = other RNA
ttccaaggaacacccaggattgc

SEQ ID NO: 2203 - RNA, 23 nt, synthetic construct
  source 1..23: mol_type = other RNA
gtccttccaaggaacacccagga

SEQ ID NO: 2204 - RNA, 23 nt, synthetic construct
  source 1..23: mol_type = other RNA
agcccaggccaggaggcagagga

SEQ ID NO: 2205 - RNA, 23 nt, synthetic construct
  source 1..23: mol_type = other RNA
cagcccaggccaggaggcagagg

SEQ ID NO: 2206 - RNA, 23 nt, synthetic construct
  source 1..23: mol_type = other RNA
gccagcccaggccaggaggcaga

SEQ ID NO: 2207 - RNA, 23 nt, synthetic construct
  source 1..23: mol_type = other RNA
tcttccatcctgtcacagcctgc

SEQ ID NO: 2208 - RNA, 23 nt, synthetic construct
  source 1..23: mol_type = other RNA
gagccccaggagttctgggtgga

SEQ ID NO: 2209 - RNA, 23 nt, synthetic construct
  source 1..23: mol_type = other RNA
cgagccccaggagttctgggtgg

SEQ ID NO: 2210 - RNA, 23 nt, synthetic construct
  source 1..23: mol_type = other RNA
catccaggacaacttctcggtga

SEQ ID NO: 2211 - RNA, 23 nt, synthetic construct
  source 1..23: mol_type = other RNA
gacatccaggacaacttctcggt

SEQ ID NO: 2212 - RNA, 23 nt, synthetic construct
  source 1..23: mol_type = other RNA
tgacatccaggacaacttctcgg

SEQ ID NO: 2213 - RNA, 23 nt, synthetic construct
  source 1..23: mol_type = other RNA
gactcaagtgcccttcactgaga

SEQ ID NO: 2214 - RNA, 23 nt, synthetic construct
  source 1..23: mol_type = other RNA
gtgactcaagtgcccttcactga

SEQ ID NO: 2215 - RNA, 23 nt, synthetic construct
  source 1..23: mol_type = other RNA
atccagcctcactatgcctctga

SEQ ID NO: 2216 - RNA, 23 nt, synthetic construct
  source 1..23: mol_type = other RNA
ccagcaaaactccctcaactgga

SEQ ID NO: 2217 - RNA, 23 nt, synthetic construct
  source 1..23: mol_type = other RNA
tccagcaaaactccctcaactgg

SEQ ID NO: 2218 - RNA, 23 nt, synthetic construct
  source 1..23: mol_type = other RNA
acccagaactcctggggctcggc

SEQ ID NO: 2219 - RNA, 23 nt, synthetic construct
  source 1..23: mol_type = other RNA
cacccagaactcctggggctcgg

SEQ ID NO: 2220 - RNA, 23 nt, synthetic construct
  source 1..23: mol_type = other RNA
tgtccacccagaactcctggggc

SEQ ID NO: 2221 - RNA, 23 nt, synthetic construct
  source 1..23: mol_type = other RNA
gtcactccagtgctggaaggtgc

SEQ ID NO: 2222 - RNA, 23 nt, synthetic construct
  source 1..23: mol_type = other RNA
tcatccagttgagggagttttgc

SEQ ID NO: 2223 - RNA, 23 nt, synthetic construct
  source 1..23: mol_type = other RNA
tgccccaactggtgctgcaagga

SEQ ID NO: 2224 - RNA, 23 nt, synthetic construct
  source 1..23: mol_type = other RNA
atgccccaactggtgctgcaagg

SEQ ID NO: 2225 - RNA, 23 nt, synthetic construct
  source 1..23: mol_type = other RNA
gctgcaaggatcttatgacctgc

SEQ ID NO: 2226 - RNA, 23 nt, synthetic construct
  source 1..23: mol_type = other RNA
ctgcaggacctgctcgcccaggc

SEQ ID NO: 2227 - RNA, 23 nt, synthetic construct
  source 1..23: mol_type = other RNA
cctgcaggacctgctcgcccagg

SEQ ID NO: 2228 - RNA, 23 nt, synthetic construct
  source 1..23: mol_type = other RNA
ctcgcccaggctgagctgcccgc

SEQ ID NO: 2229 - RNA, 23 nt, synthetic construct
  source 1..23: mol_type = other RNA
acccaacagcttaacaagcctga

SEQ ID NO: 2230 - RNA, 23 nt, synthetic construct
  source 1..23: mol_type = other RNA
gtctacccaacagcttaacaagc

SEQ ID NO: 2231 - RNA, 23 nt, synthetic construct
  source 1..23: mol_type = other RNA
caacagcttaacaagcctgaggt

SEQ ID NO: 2232 - RNA, 23 nt, synthetic construct
  source 1..23: mol_type = other RNA
ccaacagcttaacaagcctgagg

SEQ ID NO: 2233 - RNA, 23 nt, synthetic construct
  source 1..23: mol_type = other RNA
tgatcaaagcgccactgccctgc

SEQ ID NO: 2234 - RNA, 23 nt, synthetic construct
  source 1..23: mol_type = other RNA
caaaatcaacctgaaactccaga

SEQ ID NO: 2235 - RNA, 23 nt, synthetic construct
  source 1..23: mol_type = other RNA
gatcaagacaattcatcatttga

SEQ ID NO: 2236 - RNA, 23 nt, synthetic construct
  source 1..23: mol_type = other RNA
ctgcaaaccagtgaaatcaaaga

SEQ ID NO: 2237 - RNA, 23 nt, synthetic construct
  source 1..23: mol_type = other RNA
aaacaagataatagcatcaaaga

SEQ ID NO: 2238 - RNA, 23 nt, synthetic construct
  source 1..23: mol_type = other RNA
atataaacaattaaaccaacagc

SEQ ID NO: 2239 - RNA, 23 nt, synthetic construct
  source 1..23: mol_type = other RNA
caacagcatagtcaaataaaaga

SEQ ID NO: 2240 - RNA, 23 nt, synthetic construct
  source 1..23: mol_type = other RNA
catagtcaaataaaagaaataga

SEQ ID NO: 2241 - RNA, 23 nt, synthetic construct
  source 1..23: mol_type = other RNA
ttcttcagttgaatgaaataaga

SEQ ID NO: 2242 - RNA, 23 nt, synthetic construct
  source 1..23: mol_type = other RNA
taattcaacatcgaatagatgga

SEQ ID NO: 2243 - RNA, 23 nt, synthetic construct
  source 1..23: mol_type = other RNA
ttaattcaacatcgaatagatgg

SEQ ID NO: 2244 - RNA, 23 nt, synthetic construct
  source 1..23: mol_type = other RNA
atcacaaaacttcaatgaaacgt

SEQ ID NO: 2245 - RNA, 23 nt, synthetic construct
  source 1..23: mol_type = other RNA
gttctcccacgtttcattgaagt

SEQ ID NO: 2246 - RNA, 23 nt, synthetic construct
  source 1..23: mol_type = other RNA
gttttacgaattgagttggaaga

SEQ ID NO: 2247 - RNA, 23 nt, synthetic construct
  source 1..23: mol_type = other RNA
caaccaaaattctcctgaaaaga

SEQ ID NO: 2248 - RNA, 23 nt, synthetic construct
  source 1..23: mol_type = other RNA
caccaccagcctcctaaaggaga

SEQ ID NO: 2249 - RNA, 23 nt, synthetic construct
  source 1..23: mol_type = other RNA
gccaccaccagcctcctaaagga

SEQ ID NO: 2250 - RNA, 23 nt, synthetic construct
  source 1..23: mol_type = other RNA
atgcagccccgggtactccttgt

SEQ ID NO: 2251 - RNA, 23 nt, synthetic construct
  source 1..23: mol_type = other RNA
atgcagggttacatgaagcacgc

SEQ ID NO: 2252 - RNA, 23 nt, synthetic construct
  source 1..23: mol_type = other RNA
cttcatgcagggttacatgaagc

SEQ ID NO: 2253 - RNA, 23 nt, synthetic construct
  source 1..23: mol_type = other RNA
agcgtgcaggagtcccaggtggc

SEQ ID NO: 2254 - RNA, 23 nt, synthetic construct
  source 1..23: mol_type = other RNA
cagcgtgcaggagtcccaggtgg

SEQ ID NO: 2255 - RNA, 23 nt, synthetic construct
  source 1..23: mol_type = other RNA
gagtcccaggtggcccagcaggc

SEQ ID NO: 2256 - RNA, 23 nt, synthetic construct
  source 1..23: mol_type = other RNA
ggagtcccaggtggcccagcagg

SEQ ID NO: 2257 - RNA, 23 nt, synthetic construct
  source 1..23: mol_type = other RNA
cccagcaggccaggtacacccgc

SEQ ID NO: 2258 - RNA, 23 nt, synthetic construct
  source 1..23: mol_type = other RNA
acccagcccctaaatcagtcagg

SEQ ID NO: 2259 - RNA, 23 nt, synthetic construct
  source 1..23: mol_type = other RNA
ggtcacccagcccctaaatcagt

SEQ ID NO: 2260 - RNA, 23 nt, synthetic construct
  source 1..23: mol_type = other RNA
gtgctccagtagtctttcaggga

SEQ ID NO: 2261 - RNA, 23 nt, synthetic construct
  source 1..23: mol_type = other RNA
ggtgctccagtagtctttcaggg

SEQ ID NO: 2262 - RNA, 23 nt, synthetic construct
  source 1..23: mol_type = other RNA
atcccagaactcagagaacttgt

SEQ ID NO: 2263 - RNA, 23 nt, synthetic construct
  source 1..23: mol_type = other RNA
gtcacagcccaagatagttaagt

SEQ ID NO: 2264 - RNA, 23 nt, synthetic construct
  source 1..23: mol_type = other RNA
taccccacttaactatcttgggc

SEQ ID NO: 2265 - RNA, 23 nt, synthetic construct
  source 1..23: mol_type = other RNA
ttaccccacttaactatcttggg

SEQ ID NO: 2266 - RNA, 23 nt, synthetic construct
  source 1..23: mol_type = other RNA
cttaccccacttaactatcttgg

SEQ ID NO: 2267 - RNA, 23 nt, synthetic construct
  source 1..23: mol_type = other RNA
aaagaccagtccttgctgaaaga

SEQ ID NO: 2268 - RNA, 23 nt, synthetic construct
  source 1..23: mol_type = other RNA
tgcacagaaaagcacctcagagt

SEQ ID NO: 2269 - RNA, 23 nt, synthetic construct
  source 1..23: mol_type = other RNA
tgtgcacagaaaagcacctcaga

SEQ ID NO: 2270 - RNA, 23 nt, synthetic construct
  source 1..23: mol_type = other RNA
atgtctcagatggccctgaaggt

SEQ ID NO: 2271 - RNA, 23 nt, synthetic construct
  source 1..23: mol_type = other RNA
catgtctcagatggccctgaagg

SEQ ID NO: 2272 - RNA, 23 nt, synthetic construct
  source 1..23: mol_type = other RNA
ctgcccacagcaggggcagcagt

SEQ ID NO: 2273 - RNA, 23 nt, synthetic construct
  source 1..23: mol_type = other RNA
cacctgcccacagcaggggcagc

SEQ ID NO: 2274 - RNA, 23 nt, synthetic construct
  source 1..23: mol_type = other RNA
agatcaagaagtacaggaggaga

SEQ ID NO: 2275 - RNA, 23 nt, synthetic construct
  source 1..23: mol_type = other RNA
ctagatcaagaagtacaggagga

SEQ ID NO: 2276 - RNA, 23 nt, synthetic construct
  source 1..23: mol_type = other RNA
gctagatcaagaagtacaggagg

SEQ ID NO: 2277 - RNA, 23 nt, synthetic construct
  source 1..23: mol_type = other RNA
aagtacaggaggagactcagggc

SEQ ID NO: 2278 - RNA, 23 nt, synthetic construct
  source 1..23: mol_type = other RNA
gaagtacaggaggagactcaggg

SEQ ID NO: 2279 - RNA, 23 nt, synthetic construct
  source 1..23: mol_type = other RNA
agaagtacaggaggagactcagg

SEQ ID NO: 2280 - RNA, 23 nt, synthetic construct
  source 1..23: mol_type = other RNA
tccccagctctctgtgcatgtga

SEQ ID NO: 2281 - RNA, 23 nt, synthetic construct
  source 1..23: mol_type = other RNA
tctccccagctctctgtgcatgt

SEQ ID NO: 2282 - RNA, 23 nt, synthetic construct
  source 1..23: mol_type = other RNA
gctgcaagtgcaggagtcagtga

SEQ ID NO: 2283 - RNA, 23 nt, synthetic construct
  source 1..23: mol_type = other RNA
tggctgcaagtgcaggagtcagt

SEQ ID NO: 2284 - RNA, 23 nt, synthetic construct
  source 1..23: mol_type = other RNA
caagtgcaggagtcagtgacggt

SEQ ID NO: 2285 - RNA, 23 nt, synthetic construct
  source 1..23: mol_type = other RNA
gcaagtgcaggagtcagtgacgg

SEQ ID NO: 2286 - RNA, 23 nt, synthetic construct
  source 1..23: mol_type = other RNA
acggtacaggagggtttgtgcgt

SEQ ID NO: 2287 - RNA, 23 nt, synthetic construct
  source 1..23: mol_type = other RNA
aaccagtaaccatgaactgggga

SEQ ID NO: 2288 - RNA, 23 nt, synthetic construct
  source 1..23: mol_type = other RNA
gaaccagtaaccatgaactgggg

SEQ ID NO: 2289 - RNA, 23 nt, synthetic construct
  source 1..23: mol_type = other RNA
ggaaccagtaaccatgaactggg

SEQ ID NO: 2290 - RNA, 23 nt, synthetic construct
  source 1..23: mol_type = other RNA
cggaaccagtaaccatgaactgg

SEQ ID NO: 2291 - RNA, 23 nt, synthetic construct
  source 1..23: mol_type = other RNA
agccagaaatttggatccatagc

SEQ ID NO: 2292 - RNA, 23 nt, synthetic construct
  source 1..23: mol_type = other RNA
tgtcaggtgaagttcgctggagc

SEQ ID NO: 2293 - RNA, 23 nt, synthetic construct
  source 1..23: mol_type = other RNA
cctgtcaggtgaagttcgctgga

SEQ ID NO: 2294 - RNA, 23 nt, synthetic construct
  source 1..23: mol_type = other RNA
acctgtcaggtgaagttcgctgg

SEQ ID NO: 2295 - RNA, 23 nt, synthetic construct
  source 1..23: mol_type = other RNA
ccatccagctcaacgtcacctgt

SEQ ID NO: 2296 - RNA, 23 nt, synthetic construct
  source 1..23: mol_type = other RNA
caggcccaggacacagagcaggt

SEQ ID NO: 2297 - RNA, 23 nt, synthetic construct
  source 1..23: mol_type = other RNA
acaggcccaggacacagagcagg

SEQ ID NO: 2298 - RNA, 23 nt, synthetic construct
  source 1..23: mol_type = other RNA
tgacaaccaggagaagatcgggg

SEQ ID NO: 2299 - RNA, 23 nt, synthetic construct
  source 1..23: mol_type = other RNA
ttccacagaacccaacaactggt

SEQ ID NO: 2300 - RNA, 23 nt, synthetic construct
  source 1..23: mol_type = other RNA
gttccacagaacccaacaactgg

SEQ ID NO: 2301 - RNA, 23 nt, synthetic construct
  source 1..23: mol_type = other RNA
aaacaagagaccagagcaggagt

SEQ ID NO: 2302 - RNA, 23 nt, synthetic construct
  source 1..23: mol_type = other RNA
ggaaacaagagaccagagcagga

SEQ ID NO: 2303 - RNA, 23 nt, synthetic construct
  source 1..23: mol_type = other RNA
gggaaacaagagaccagagcagg

SEQ ID NO: 2304 - RNA, 23 nt, synthetic construct
  source 1..23: mol_type = other RNA
gaaacaccagaagaagtccaagt

SEQ ID NO: 2305 - RNA, 23 nt, synthetic construct
  source 1..23: mol_type = other RNA
cggcagaagtgccggaacattga

SEQ ID NO: 2306 - RNA, 23 nt, synthetic construct
  source 1..23: mol_type = other RNA
tgccaaaactgcaaggtaggagc

SEQ ID NO: 2307 - RNA, 23 nt, synthetic construct
  source 1..23: mol_type = other RNA
tgtgccaaaactgcaaggtagga

SEQ ID NO: 2308 - RNA, 23 nt, synthetic construct
  source 1..23: mol_type = other RNA
atgtgccaaaactgcaaggtagg

SEQ ID NO: 2309 - RNA, 23 nt, synthetic construct
  source 1..23: mol_type = other RNA
cgtaccagtacgacgacgacggc

SEQ ID NO: 2310 - RNA, 23 nt, synthetic construct
  source 1..23: mol_type = other RNA
gcgtaccagtacgacgacgacgg

SEQ ID NO: 2311 - RNA, 23 nt, synthetic construct
  source 1..23: mol_type = other RNA
gcccaggcagccattaaggaaga

SEQ ID NO: 2312 - RNA, 23 nt, synthetic construct
  source 1..23: mol_type = other RNA
gctgcccaggcagccattaagga

SEQ ID NO: 2313 - RNA, 23 nt, synthetic construct
  source 1..23: mol_type = other RNA
ggctgcccaggcagccattaagg

SEQ ID NO: 2314 - RNA, 23 nt, synthetic construct
  source 1..23: mol_type = other RNA
gaccaggaatttgtgagtgctgg

SEQ ID NO: 2315 - RNA, 23 nt, synthetic construct
  source 1..23: mol_type = other RNA
cacgaccaggaatttgtgagtgc

SEQ ID NO: 2316 - RNA, 23 nt, synthetic construct
  source 1..23: mol_type = other RNA
ttccaggggtcttccttaatggc

SEQ ID NO: 2317 - RNA, 23 nt, synthetic construct
  source 1..23: mol_type = other RNA
gttccaggggtcttccttaatgg

SEQ ID NO: 2318 - RNA, 23 nt, synthetic construct
  source 1..23: mol_type = other RNA
agggccagtcctctcgccgccgc

SEQ ID NO: 2319 - RNA, 23 nt, synthetic construct
  source 1..23: mol_type = other RNA
gggagggccagtcctctcgccgc

SEQ ID NO: 2320 - RNA, 23 nt, synthetic construct
  source 1..23: mol_type = other RNA
attcaggtggaccgctacattgc

SEQ ID NO: 2321 - RNA, 23 nt, synthetic construct
  source 1..23: mol_type = other RNA
caccaggggaagatcatgtacgt

SEQ ID NO: 2322 - RNA, 23 nt, synthetic construct
  source 1..23: mol_type = other RNA
gcggcaccaggggaagatcatgt

SEQ ID NO: 2323 - RNA, 23 nt, synthetic construct
  source 1..23: mol_type = other RNA
atccaggagtggggcccattcga

SEQ ID NO: 2324 - RNA, 23 nt, synthetic construct
  source 1..23: mol_type = other RNA
ccccactcctggatctgggagga

SEQ ID NO: 2325 - RNA, 23 nt, synthetic construct
  source 1..23: mol_type = other RNA
gccccactcctggatctgggagg

SEQ ID NO: 2326 - RNA, 23 nt, synthetic construct
  source 1..23: mol_type = other RNA
gggccccactcctggatctggga

SEQ ID NO: 2327 - RNA, 23 nt, synthetic construct
  source 1..23: mol_type = other RNA
tgggccccactcctggatctggg

SEQ ID NO: 2328 - RNA, 23 nt, synthetic construct
  source 1..23: mol_type = other RNA
ctcgcgatttctcgaggtatagc

SEQ ID NO: 2329 - RNA, 23 nt, synthetic construct
  source 1..23: mol_type = other RNA
caaagagccagaagaaggggcga

SEQ ID NO: 2330 - RNA, 23 nt, synthetic construct
  source 1..23: mol_type = other RNA
accccagaagtagcgggccctgt

SEQ ID NO: 2331 - RNA, 23 nt, synthetic construct
  source 1..23: mol_type = other RNA
ggaccgaaaggtgagcagcgggc

SEQ ID NO: 2332 - RNA, 23 nt, synthetic construct
  source 1..23: mol_type = other RNA
aggaccgaaaggtgagcagcggg

SEQ ID NO: 2333 - RNA, 23 nt, synthetic construct
  source 1..23: mol_type = other RNA
gaggaccgaaaggtgagcagcgg

SEQ ID NO: 2334 - RNA, 23 nt, synthetic construct
  source 1..23: mol_type = other RNA
ctgcaggagtgtctggagcatgg

SEQ ID NO: 2335 - RNA, 23 nt, synthetic construct
  source 1..23: mol_type = other RNA
ggagctgcaggagtgtctggagc

SEQ ID NO: 2336 - RNA, 23 nt, synthetic construct
  source 1..23: mol_type = other RNA
cataaagcagggcaaagaccagc

SEQ ID NO: 2337 - RNA, 23 nt, synthetic construct
  source 1..23: mol_type = other RNA
gaggcagagactgctgggccggt

SEQ ID NO: 2338 - RNA, 23 nt, synthetic construct
  source 1..23: mol_type = other RNA
cgaggcagagactgctgggccgg

SEQ ID NO: 2339 - RNA, 23 nt, synthetic construct
  source 1..23: mol_type = other RNA
cgctccatgaccggcccagcagt

SEQ ID NO: 2340 - RNA, 23 nt, synthetic construct
  source 1..23: mol_type = other RNA
gcacgctccatgaccggcccagc

SEQ ID NO: 2341 - RNA, 23 nt, synthetic construct
  source 1..23: mol_type = other RNA
aggagcaggaggagccgcgtggc

SEQ ID NO: 2342 - RNA, 23 nt, synthetic construct
  source 1..23: mol_type = other RNA
gaggagcaggaggagccgcgtgg

SEQ ID NO: 2343 - RNA, 23 nt, synthetic construct
  source 1..23: mol_type = other RNA
cgccaagagcccagcaccacggc

SEQ ID NO: 2344 - RNA, 23 nt, synthetic construct
  source 1..23: mol_type = other RNA
gcgccaagagcccagcaccacgg

SEQ ID NO: 2345 - RNA, 23 nt, synthetic construct
  source 1..23: mol_type = other RNA
agccccagccagaggaggggagc

SEQ ID NO: 2346 - RNA, 23 nt, synthetic construct
  source 1..23: mol_type = other RNA
tgagccccagccagaggagggga

SEQ ID NO: 2347 - RNA, 23 nt, synthetic construct
  source 1..23: mol_type = other RNA
gggcagaagggcggggccccagc

SEQ ID NO: 2348 - RNA, 23 nt, synthetic construct
  source 1..23: mol_type = other RNA
gcccaggactcaggcgcctcaga

SEQ ID NO: 2349 - RNA, 23 nt, synthetic construct
  source 1..23: mol_type = other RNA
ggccgaggagcccctgcagaagc

SEQ ID NO: 2350 - RNA, 23 nt, synthetic construct
  source 1..23: mol_type = other RNA
gagggccgaggagcccctgcaga

SEQ ID NO: 2351 - RNA, 23 nt, synthetic construct
  source 1..23: mol_type = other RNA
gaacagaaggagaccaacatcga

SEQ ID NO: 2352 - RNA, 23 nt, synthetic construct
  source 1..23: mol_type = other RNA
ccgtcagcggcccatgccgaggc

SEQ ID NO: 2353 - RNA, 23 nt, synthetic construct
  source 1..23: mol_type = other RNA
tccgtcagcggcccatgccgagg

SEQ ID NO: 2354 - RNA, 23 nt, synthetic construct
  source 1..23: mol_type = other RNA
cctccgtcagcggcccatgccga

SEQ ID NO: 2355 - RNA, 23 nt, synthetic construct
  source 1..23: mol_type = other RNA
actcccagcccaagccaccccgc

SEQ ID NO: 2356 - RNA, 23 nt, synthetic construct
  source 1..23: mol_type = other RNA
ccagccactcgtcccgcttgcgc

SEQ ID NO: 2357 - RNA, 23 nt, synthetic construct
  source 1..23: mol_type = other RNA
tgccagccactcgtcccgcttgc

SEQ ID NO: 2358 - RNA, 23 nt, synthetic construct
  source 1..23: mol_type = other RNA
tttccagcgtgccagccactcgt

SEQ ID NO: 2359 - RNA, 23 nt, synthetic construct
  source 1..23: mol_type = other RNA
agaaaaccaggggcccggggagt

SEQ ID NO: 2360 - RNA, 23 nt, synthetic construct
  source 1..23: mol_type = other RNA
gagtctcagaaggtggaggaggc

SEQ ID NO: 2361 - RNA, 23 nt, synthetic construct
  source 1..23: mol_type = other RNA
ggagtctcagaaggtggaggagg

SEQ ID NO: 2362 - RNA, 23 nt, synthetic construct
  source 1..23: mol_type = other RNA
gtgcagcagcccactgaccccgc

SEQ ID NO: 2363 - RNA, 23 nt, synthetic construct
  source 1..23: mol_type = other RNA
gccaccaggagaagccccgcagt

SEQ ID NO: 2364 - RNA, 23 nt, synthetic construct
  source 1..23: mol_type = other RNA
ctggccaccaggagaagccccgc

SEQ ID NO: 2365 - RNA, 23 nt, synthetic construct
  source 1..23: mol_type = other RNA
caccaagacacaatgcggcctgg

SEQ ID NO: 2366 - RNA, 23 nt, synthetic construct
  source 1..23: mol_type = other RNA
catccaccaagacacaatgcggc

SEQ ID NO: 2367 - RNA, 23 nt, synthetic construct
  source 1..23: mol_type = other RNA
tcatccaccaagacacaatgcgg

SEQ ID NO: 2368 - RNA, 23 nt, synthetic construct
  source 1..23: mol_type = other RNA
cgtcatccaccaagacacaatgc

SEQ ID NO: 2369 - RNA, 23 nt, synthetic construct
  source 1..23: mol_type = other RNA
acccagcgggtgccttcagctgc

SEQ ID NO: 2370 - RNA, 23 nt, synthetic construct
  source 1..23: mol_type = other RNA
atgacccagcgggtgccttcagc

SEQ ID NO: 2371 - RNA, 23 nt, synthetic construct
  source 1..23: mol_type = other RNA
gaaccacatgacccagcgggtgc

SEQ ID NO: 2372 - RNA, 23 nt, synthetic construct
  source 1..23: mol_type = other RNA
ccgaaccacatgacccagcgggt

SEQ ID NO: 2373 - RNA, 23 nt, synthetic construct
  source 1..23: mol_type = other RNA
tccgaaccacatgacccagcggg

SEQ ID NO: 2374 - RNA, 23 nt, synthetic construct
  source 1..23: mol_type = other RNA
ccaccaggccacgtacaacaagc

SEQ ID NO: 2375 - RNA, 23 nt, synthetic construct
  source 1..23: mol_type = other RNA
aagcagcccatgtaccgcaaagc

SEQ ID NO: 2376 - RNA, 23 nt, synthetic construct
  source 1..23: mol_type = other RNA
ctgcaggtgagtgtccctgctgg

SEQ ID NO: 2377 - RNA, 23 nt, synthetic construct
  source 1..23: mol_type = other RNA
gtcctgcaggtgagtgtccctgc

SEQ ID NO: 2378 - RNA, 23 nt, synthetic construct
  source 1..23: mol_type = other RNA
gtgcagaacaagcccatgattga

SEQ ID NO: 2379 - RNA, 23 nt, synthetic construct
  source 1..23: mol_type = other RNA
ggaggtgcagaacaagcccatga

SEQ ID NO: 2380 - RNA, 23 nt, synthetic construct
  source 1..23: mol_type = other RNA
ttccagccttctggccctaaggg

SEQ ID NO: 2381 - RNA, 23 nt, synthetic construct
  source 1..23: mol_type = other RNA
cttccagccttctggccctaagg

SEQ ID NO: 2382 - RNA, 23 nt, synthetic construct
  source 1..23: mol_type = other RNA
ggcccattcaatcatgggcttgt

SEQ ID NO: 2383 - RNA, 23 nt, synthetic construct
  source 1..23: mol_type = other RNA
ccagggcccattcaatcatgggc

SEQ ID NO: 2384 - RNA, 23 nt, synthetic construct
  source 1..23: mol_type = other RNA
cctgcagttccaccgcttctggt

SEQ ID NO: 2385 - RNA, 23 nt, synthetic construct
  source 1..23: mol_type = other RNA
acctgcagttccaccgcttctgg

SEQ ID NO: 2386 - RNA, 23 nt, synthetic construct
  source 1..23: mol_type = other RNA
gtcccagatccaggtgaggccgc

SEQ ID NO: 2387 - RNA, 23 nt, synthetic construct
  source 1..23: mol_type = other RNA
gaagtcccagatccaggtgaggc

SEQ ID NO: 2388 - RNA, 23 nt, synthetic construct
  source 1..23: mol_type = other RNA
atccaggtgaggccgcccctggc

SEQ ID NO: 2389 - RNA, 23 nt, synthetic construct
  source 1..23: mol_type = other RNA
gatccaggtgaggccgcccctgg

SEQ ID NO: 2390 - RNA, 23 nt, synthetic construct
  source 1..23: mol_type = other RNA
tctctgcgatccattgtggtggc

SEQ ID NO: 2391 - RNA, 23 nt, synthetic construct
  source 1..23: mol_type = other RNA
ctctctgcgatccattgtggtgg

SEQ ID NO: 2392 - RNA, 23 nt, synthetic construct
  source 1..23: mol_type = other RNA
cggaccagaagcggtggaactgc

SEQ ID NO: 2393 - RNA, 23 nt, synthetic construct
  source 1..23: mol_type = other RNA
ggtccagcacatcgctctcaaga

SEQ ID NO: 2394 - RNA, 23 nt, synthetic construct
  source 1..23: mol_type = other RNA
caaacaactgcgggagaagctga

SEQ ID NO: 2395 - RNA, 23 nt, synthetic construct
  source 1..23: mol_type = other RNA
ctacaaacaactgcgggagaagc

SEQ ID NO: 2396 - RNA, 23 nt, synthetic construct
  source 1..23: mol_type = other RNA
ctgcagatcttcaccaaaccggt

SEQ ID NO: 2397 - RNA, 23 nt, synthetic construct
  source 1..23: mol_type = other RNA
cctgcagatcttcaccaaaccgg

SEQ ID NO: 2398 - RNA, 23 nt, synthetic construct
  source 1..23: mol_type = other RNA
accggtgcaggaccggcccacgc

SEQ ID NO: 2399 - RNA, 23 nt, synthetic construct
  source 1..23: mol_type = other RNA
atccagcgccacaaccaccaggt

SEQ ID NO: 2400 - RNA, 23 nt, synthetic construct
  source 1..23: mol_type = other RNA
catccagcgccacaaccaccagg

SEQ ID NO: 2401 - RNA, 23 nt, synthetic construct
  source 1..23: mol_type = other RNA
caccaggtactgcttgtccccgg

SEQ ID NO: 2402 - RNA, 23 nt, synthetic construct
  source 1..23: mol_type = other RNA
gccaagcaggtagaagccggggc

SEQ ID NO: 2403 - RNA, 23 nt, synthetic construct
  source 1..23: mol_type = other RNA
cgccaagcaggtagaagccgggg

SEQ ID NO: 2404 - RNA, 23 nt, synthetic construct
  source 1..23: mol_type = other RNA
aacccagaaggtcacagagtgga

SEQ ID NO: 2405 - RNA, 23 nt, synthetic construct
  source 1..23: mol_type = other RNA
caacccagaaggtcacagagtgg

SEQ ID NO: 2406 - RNA, 23 nt, synthetic construct
  source 1..23: mol_type = other RNA
gccaacccagaaggtcacagagt

SEQ ID NO: 2407 - RNA, 23 nt, synthetic construct
  source 1..23: mol_type = other RNA
ttccaggggttgagcgctgagga

SEQ ID NO: 2408 - RNA, 23 nt, synthetic construct
  source 1..23: mol_type = other RNA
gttccaggggttgagcgctgagg

SEQ ID NO: 2409 - RNA, 23 nt, synthetic construct
  source 1..23: mol_type = other RNA
ttgttccaggggttgagcgctga

SEQ ID NO: 2410 - RNA, 23 nt, synthetic construct
  source 1..23: mol_type = other RNA
gtgcaggtaagaaagcacctggg

SEQ ID NO: 2411 - RNA, 23 nt, synthetic construct
  source 1..23: mol_type = other RNA
cgtgcaggtaagaaagcacctgg

SEQ ID NO: 2412 - RNA, 23 nt, synthetic construct
  source 1..23: mol_type = other RNA
gagcaagacaagtttgggaaggt

SEQ ID NO: 2413 - RNA, 23 nt, synthetic construct
  source 1..23: mol_type = other RNA
agagcaagacaagtttgggaagg

SEQ ID NO: 2414 - RNA, 23 nt, synthetic construct
  source 1..23: mol_type = other RNA
ggtagagcaagacaagtttggga

SEQ ID NO: 2415 - RNA, 23 nt, synthetic construct
  source 1..23: mol_type = other RNA
ctctacccagggctcccgcatga

SEQ ID NO: 2416 - RNA, 23 nt, synthetic construct
  source 1..23: mol_type = other RNA
ggccaattcttgcctggatatga

SEQ ID NO: 2417 - RNA, 23 nt, synthetic construct
  source 1..23: mol_type = other RNA
aaccagcctgatcaggagatggt

SEQ ID NO: 2418 - RNA, 23 nt, synthetic construct
  source 1..23: mol_type = other RNA
aaaccagcctgatcaggagatgg

SEQ ID NO: 2419 - RNA, 23 nt, synthetic construct
  source 1..23: mol_type = other RNA
gggaaaccagcctgatcaggaga

SEQ ID NO: 2420 - RNA, 23 nt, synthetic construct
  source 1..23: mol_type = other RNA
cctgatcaggagatggtgtccgc

SEQ ID NO: 2421 - RNA, 23 nt, synthetic construct
  source 1..23: mol_type = other RNA
ctggcaggtgagcctgcaggtga

SEQ ID NO: 2422 - RNA, 23 nt, synthetic construct
  source 1..23: mol_type = other RNA
ccctggcaggtgagcctgcaggt

SEQ ID NO: 2423 - RNA, 23 nt, synthetic construct
  source 1..23: mol_type = other RNA
gccctggcaggtgagcctgcagg

SEQ ID NO: 2424 - RNA, 23 nt, synthetic construct
  source 1..23: mol_type = other RNA
agcctgcaggtgaagctgacagc

SEQ ID NO: 2425 - RNA, 23 nt, synthetic construct
  source 1..23: mol_type = other RNA
gctcagaggcacctgtgtggagg

SEQ ID NO: 2426 - RNA, 23 nt, synthetic construct
  source 1..23: mol_type = other RNA
cagctcagaggcacctgtgtgga

SEQ ID NO: 2427 - RNA, 23 nt, synthetic construct
  source 1..23: mol_type = other RNA
acagctcagaggcacctgtgtgg

SEQ ID NO: 2428 - RNA, 23 nt, synthetic construct
  source 1..23: mol_type = other RNA
caccagtgggtcctcactgctgc

SEQ ID NO: 2429 - RNA, 23 nt, synthetic construct
  source 1..23: mol_type = other RNA
ggacaccagtgggtcctcactgc

SEQ ID NO: 2430 - RNA, 23 nt, synthetic construct
  source 1..23: mol_type = other RNA
gggccactctccccaagaagagt

SEQ ID NO: 2431 - RNA, 23 nt, synthetic construct
  source 1..23: mol_type = other RNA
cagggccactctccccaagaaga

SEQ ID NO: 2432 - RNA, 23 nt, synthetic construct
  source 1..23: mol_type = other RNA
tgccagggccactctccccaaga

SEQ ID NO: 2433 - RNA, 23 nt, synthetic construct
  source 1..23: mol_type = other RNA
acccactggtgtcctatgagtga

SEQ ID NO: 2434 - RNA, 23 nt, synthetic construct
  source 1..23: mol_type = other RNA
ggacccactggtgtcctatgagt

SEQ ID NO: 2435 - RNA, 23 nt, synthetic construct
  source 1..23: mol_type = other RNA
gaggacccactggtgtcctatga

SEQ ID NO: 2436 - RNA, 23 nt, synthetic construct
  source 1..23: mol_type = other RNA
caccaaaactataaagtctcaga

SEQ ID NO: 2437 - RNA, 23 nt, synthetic construct
  source 1..23: mol_type = other RNA
tgcgccaaacatcctgcagggga

SEQ ID NO: 2438 - RNA, 23 nt, synthetic construct
  source 1..23: mol_type = other RNA
atgcgccaaacatcctgcagggg

SEQ ID NO: 2439 - RNA, 23 nt, synthetic construct
  source 1..23: mol_type = other RNA
gatgcgccaaacatcctgcaggg

SEQ ID NO: 2440 - RNA, 23 nt, synthetic construct
  source 1..23: mol_type = other RNA
acccaacagttggtataaattgt

SEQ ID NO: 2441 - RNA, 23 nt, synthetic construct
  source 1..23: mol_type = other RNA
gccccatccggttacccaacagt

SEQ ID NO: 2442 - RNA, 23 nt, synthetic construct
  source 1..23: mol_type = other RNA
atccaaaatattctacaaaaggt

SEQ ID NO: 2443 - RNA, 23 nt, synthetic construct
  source 1..23: mol_type = other RNA
aatccaaaatattctacaaaagg

SEQ ID NO: 2444 - RNA, 23 nt, synthetic construct
  source 1..23: mol_type = other RNA
gaatgccagaaaagatatcaaga

SEQ ID NO: 2445 - RNA, 23 nt, synthetic construct
  source 1..23: mol_type = other RNA
acccaacggatggtctgtgctgg

SEQ ID NO: 2446 - RNA, 23 nt, synthetic construct
  source 1..23: mol_type = other RNA
ataacccaacggatggtctgtgc

SEQ ID NO: 2447 - RNA, 23 nt, synthetic construct
  source 1..23: mol_type = other RNA
acacagagcagtgatggaaaagc

SEQ ID NO: 2448 - RNA, 23 nt, synthetic construct
  source 1..23: mol_type = other RNA
aaagctcagatgcagtcaccagc

SEQ ID NO: 2449 - RNA, 23 nt, synthetic construct
  source 1..23: mol_type = other RNA
atgcagtcaccagcatgagaagc

SEQ ID NO: 2450 - RNA, 23 nt, synthetic construct
  source 1..23: mol_type = other RNA
cagatgcagtcaccagcatgaga

SEQ ID NO: 2451 - RNA, 23 nt, synthetic construct
  source 1..23: mol_type = other RNA
acgccacattccattgtgtttgc

SEQ ID NO: 2452 - RNA, 23 nt, synthetic construct
  source 1..23: mol_type = other RNA
ccaaacgccacattccattgtgt

SEQ ID NO: 2453 - RNA, 23 nt, synthetic construct
  source 1..23: mol_type = other RNA
aatccagtccatgtactcagcga

SEQ ID NO: 2454 - RNA, 23 nt, synthetic construct
  source 1..23: mol_type = other RNA
aaaatccagtccatgtactcagc

SEQ ID NO: 2455 - RNA, 23 nt, synthetic construct
  source 1..23: mol_type = other RNA
ctgactcaactctatgaaaacgc

SEQ ID NO: 2456 - RNA, 23 nt, synthetic construct
  source 1..23: mol_type = other RNA
tgcccaatactgccagatgaggt

SEQ ID NO: 2457 - RNA, 23 nt, synthetic construct
  source 1..23: mol_type = other RNA
atgcccaatactgccagatgagg

SEQ ID NO: 2458 - RNA, 23 nt, synthetic construct
  source 1..23: mol_type = other RNA
aaatgcccaatactgccagatga

SEQ ID NO: 2459 - RNA, 23 nt, synthetic construct
  source 1..23: mol_type = other RNA
tcatcaaataagtggtaagttgt

SEQ ID NO: 2460 - RNA, 23 nt, synthetic construct
  source 1..23: mol_type = other RNA
tggtcatcaaataagtggtaagt

SEQ ID NO: 2461 - RNA, 23 nt, synthetic construct
  source 1..23: mol_type = other RNA
catcgaacaggtgcagtttctgg

SEQ ID NO: 2462 - RNA, 23 nt, synthetic construct
  source 1..23: mol_type = other RNA
acgcaaacatttcacaaggcaga

SEQ ID NO: 2463 - RNA, 23 nt, synthetic construct
  source 1..23: mol_type = other RNA
gccacgcaaacatttcacaaggc

SEQ ID NO: 2464 - RNA, 23 nt, synthetic construct
  source 1..23: mol_type = other RNA
tgccacgcaaacatttcacaagg

SEQ ID NO: 2465 - RNA, 23 nt, synthetic construct
  source 1..23: mol_type = other RNA
catcgagacatttataaaggagt

SEQ ID NO: 2466 - RNA, 23 nt, synthetic construct
  source 1..23: mol_type = other RNA
gccatcgagacatttataaagga

SEQ ID NO: 2467 - RNA, 23 nt, synthetic construct
  source 1..23: mol_type = other RNA
tgccatcgagacatttataaagg

SEQ ID NO: 2468 - RNA, 23 nt, synthetic construct
  source 1..23: mol_type = other RNA
ttccagcatcttgcgttctcaga

SEQ ID NO: 2469 - RNA, 23 nt, synthetic construct
  source 1..23: mol_type = other RNA
tcacaaaggcgagtatgcatgga

SEQ ID NO: 2470 - RNA, 23 nt, synthetic construct
  source 1..23: mol_type = other RNA
gtcacaaaggcgagtatgcatgg

SEQ ID NO: 2471 - RNA, 23 nt, synthetic construct
  source 1..23: mol_type = other RNA
ttccatacatttgtatagaatgt

SEQ ID NO: 2472 - RNA, 23 nt, synthetic construct
  source 1..23: mol_type = other RNA
gattttccatacatttgtataga

SEQ ID NO: 2473 - RNA, 23 nt, synthetic construct
  source 1..23: mol_type = other RNA
cctcaagaaaacaccatatctgg

SEQ ID NO: 2474 - RNA, 23 nt, synthetic construct
  source 1..23: mol_type = other RNA
ttgccaagagacttgcacaaaga

SEQ ID NO: 2475 - RNA, 23 nt, synthetic construct
  source 1..23: mol_type = other RNA
ctaccccaggccaactgcagcgt

SEQ ID NO: 2476 - RNA, 23 nt, synthetic construct
  source 1..23: mol_type = other RNA
caacagggccacgtcctcacagg

SEQ ID NO: 2477 - RNA, 23 nt, synthetic construct
  source 1..23: mol_type = other RNA
ggtcagcccaaccagtgcgtggg

SEQ ID NO: 2478 - RNA, 23 nt, synthetic construct
  source 1..23: mol_type = other RNA
aggtcagcccaaccagtgcgtgg

SEQ ID NO: 2479 - RNA, 23 nt, synthetic construct
  source 1..23: mol_type = other RNA
cgaggtcagcccaaccagtgcgt

SEQ ID NO: 2480 - RNA, 23 nt, synthetic construct
  source 1..23: mol_type = other RNA
aaccagtgcgtgggccacaggga

SEQ ID NO: 2481 - RNA, 23 nt, synthetic construct
  source 1..23: mol_type = other RNA
caaccagtgcgtgggccacaggg

SEQ ID NO: 2482 - RNA, 23 nt, synthetic construct
  source 1..23: mol_type = other RNA
ccaaccagtgcgtgggccacagg

SEQ ID NO: 2483 - RNA, 23 nt, synthetic construct
  source 1..23: mol_type = other RNA
ccctcaggagcaggtgaagaggc

SEQ ID NO: 2484 - RNA, 23 nt, synthetic construct
  source 1..23: mol_type = other RNA
cccctcaggagcaggtgaagagg

SEQ ID NO: 2485 - RNA, 23 nt, synthetic construct
  source 1..23: mol_type = other RNA
ggcccctcaggagcaggtgaaga

SEQ ID NO: 2486 - RNA, 23 nt, synthetic construct
  source 1..23: mol_type = other RNA
ggagcaggtgaagaggcccgtga

SEQ ID NO: 2487 - RNA, 23 nt, synthetic construct
  source 1..23: mol_type = other RNA
caggagcaggtgaagaggcccgt

SEQ ID NO: 2488 - RNA, 23 nt, synthetic construct
  source 1..23: mol_type = other RNA
gccacgaggtcagcccaaccagt

SEQ ID NO: 2489 - RNA, 23 nt, synthetic construct
  source 1..23: mol_type = other RNA
tcccagtgggagctgcagcctgg

SEQ ID NO: 2490 - RNA, 23 nt, synthetic construct
  source 1..23: mol_type = other RNA
cacctcccagtgggagctgcagc

SEQ ID NO: 2491 - RNA, 23 nt, synthetic construct
  source 1..23: mol_type = other RNA
cctggcgcaggcctcccaggagc

SEQ ID NO: 2492 - RNA, 23 nt, synthetic construct
  source 1..23: mol_type = other RNA
ctcccaggagctccagtgacagc

SEQ ID NO: 2493 - RNA, 23 nt, synthetic construct
  source 1..23: mol_type = other RNA
agggtccagccctcctcgcaggc

SEQ ID NO: 2494 - RNA, 23 nt, synthetic construct
  source 1..23: mol_type = other RNA
cagggtccagccctcctcgcagg

SEQ ID NO: 2495 - RNA, 23 nt, synthetic construct
  source 1..23: mol_type = other RNA
gcgcaggaggacgaggacggcga

SEQ ID NO: 2496 - RNA, 23 nt, synthetic construct
  source 1..23: mol_type = other RNA
gtgcgcaggaggacgaggacggc

SEQ ID NO: 2497 - RNA, 23 nt, synthetic construct
  source 1..23: mol_type = other RNA
cgtgcgcaggaggacgaggacgg

SEQ ID NO: 2498 - RNA, 23 nt, synthetic construct
  source 1..23: mol_type = other RNA
ccaccaggaccgcctggagctga

SEQ ID NO: 2499 - RNA, 23 nt, synthetic construct
  source 1..23: mol_type = other RNA
cggccaccaggaccgcctggagc

SEQ ID NO: 2500 - RNA, 23 nt, synthetic construct
  source 1..23: mol_type = other RNA
agcggccaccaggaccgcctgga

SEQ ID NO: 2501 - RNA, 23 nt, synthetic construct
  source 1..23: mol_type = other RNA
cagcggccaccaggaccgcctgg

SEQ ID NO: 2502 - RNA, 23 nt, synthetic construct
  source 1..23: mol_type = other RNA
aggcccaggctgcccgccgggga

SEQ ID NO: 2503 - RNA, 23 nt, synthetic construct
  source 1..23: mol_type = other RNA
caggcccaggctgcccgccgggg

SEQ ID NO: 2504 - RNA, 23 nt, synthetic construct
  source 1..23: mol_type = other RNA
gcaggcccaggctgcccgccggg

SEQ ID NO: 2505 - RNA, 23 nt, synthetic construct
  source 1..23: mol_type = other RNA
ctctcgcagtcagagcgcactgc

SEQ ID NO: 2506 - RNA, 23 nt, synthetic construct
  source 1..23: mol_type = other RNA
gcctgcaggcccaggctgcccgc

SEQ ID NO: 2507 - RNA, 23 nt, synthetic construct
  source 1..23: mol_type = other RNA
ctccacggatcctggccccatgc

SEQ ID NO: 2508 - RNA, 23 nt, synthetic construct
  source 1..23: mol_type = other RNA
ctttgcccagagcatcccgtgga

SEQ ID NO: 2509 - RNA, 23 nt, synthetic construct
  source 1..23: mol_type = other RNA
aggttccacgggatgctctgggc

SEQ ID NO: 2510 - RNA, 23 nt, synthetic construct
  source 1..23: mol_type = other RNA
caggttccacgggatgctctggg

SEQ ID NO: 2511 - RNA, 23 nt, synthetic construct
  source 1..23: mol_type = other RNA
agcatacagagtgaccaccggga

SEQ ID NO: 2512 - RNA, 23 nt, synthetic construct
  source 1..23: mol_type = other RNA
cagcatacagagtgaccaccggg

SEQ ID NO: 2513 - RNA, 23 nt, synthetic construct
  source 1..23: mol_type = other RNA
cacagacaggtaagcacggccgt

SEQ ID NO: 2514 - RNA, 23 nt, synthetic construct
  source 1..23: mol_type = other RNA
aactgccaagggaagggcacggt

SEQ ID NO: 2515 - RNA, 23 nt, synthetic construct
  source 1..23: mol_type = other RNA
caactgccaagggaagggcacgg

SEQ ID NO: 2516 - RNA, 23 nt, synthetic construct
  source 1..23: mol_type = other RNA
agccagctggtccagcctgtggg

SEQ ID NO: 2517 - RNA, 23 nt, synthetic construct
  source 1..23: mol_type = other RNA
aagccagctggtccagcctgtgg

SEQ ID NO: 2518 - RNA, 23 nt, synthetic construct
  source 1..23: mol_type = other RNA
aaaagccagctggtccagcctgt

SEQ ID NO: 2519 - RNA, 23 nt, synthetic construct
  source 1..23: mol_type = other RNA
gtccagcctgtggggccactggt

SEQ ID NO: 2520 - RNA, 23 nt, synthetic construct
  source 1..23: mol_type = other RNA
ggtccagcctgtggggccactgg

SEQ ID NO: 2521 - RNA, 23 nt, synthetic construct
  source 1..23: mol_type = other RNA
tgccagcgcctggcgagggctgg

SEQ ID NO: 2522 - RNA, 23 nt, synthetic construct
  source 1..23: mol_type = other RNA
gcctgccagcgcctggcgagggc

SEQ ID NO: 2523 - RNA, 23 nt, synthetic construct
  source 1..23: mol_type = other RNA
cgcctgccagcgcctggcgaggg

SEQ ID NO: 2524 - RNA, 23 nt, synthetic construct
  source 1..23: mol_type = other RNA
caatgcccaagaccagccggtga

SEQ ID NO: 2525 - RNA, 23 nt, synthetic construct
  source 1..23: mol_type = other RNA
agaccagccggtgaccctgggga

SEQ ID NO: 2526 - RNA, 23 nt, synthetic construct
  source 1..23: mol_type = other RNA
aagaccagccggtgaccctgggg

SEQ ID NO: 2527 - RNA, 23 nt, synthetic construct
  source 1..23: mol_type = other RNA
caagaccagccggtgaccctggg

SEQ ID NO: 2528 - RNA, 23 nt, synthetic construct
  source 1..23: mol_type = other RNA
ccaagaccagccggtgaccctgg

SEQ ID NO: 2529 - RNA, 23 nt, synthetic construct
  source 1..23: mol_type = other RNA
tcacagagtgggacatcacaggc

SEQ ID NO: 2530 - RNA, 23 nt, synthetic construct
  source 1..23: mol_type = other RNA
gtcacagagtgggacatcacagg

SEQ ID NO: 2531 - RNA, 23 nt, synthetic construct
  source 1..23: mol_type = other RNA
tcacaggctgctgcccacgtggc

SEQ ID NO: 2532 - RNA, 23 nt, synthetic construct
  source 1..23: mol_type = other RNA
atcacaggctgctgcccacgtgg

SEQ ID NO: 2533 - RNA, 23 nt, synthetic construct
  source 1..23: mol_type = other RNA
acatcacaggctgctgcccacgt

SEQ ID NO: 2534 - RNA, 23 nt, synthetic construct
  source 1..23: mol_type = other RNA
agggaaccaggcctcattgatga

SEQ ID NO: 2535 - RNA, 23 nt, synthetic construct
  source 1..23: mol_type = other RNA
tggcagctgttttgcaggactgt

SEQ ID NO: 2536 - RNA, 23 nt, synthetic construct
  source 1..23: mol_type = other RNA
aggttggcagctgttttgcagga

SEQ ID NO: 2537 - RNA, 23 nt, synthetic construct
  source 1..23: mol_type = other RNA
ctacaactgggctggcggccagg

SEQ ID NO: 2538 - RNA, 23 nt, synthetic construct
  source 1..23: mol_type = other RNA
ggtgctacaactgggctggcggc

SEQ ID NO: 2539 - RNA, 23 nt, synthetic construct
  source 1..23: mol_type = other RNA
ccacaggcgccctggccagtcgt

SEQ ID NO: 2540 - RNA, 23 nt, synthetic construct
  source 1..23: mol_type = other RNA
atcccacaggcgccctggccagt

SEQ ID NO: 2541 - RNA, 23 nt, synthetic construct
  source 1..23: mol_type = other RNA
ccgcccagacgactggccagggc

SEQ ID NO: 2542 - RNA, 23 nt, synthetic construct
  source 1..23: mol_type = other RNA
accgcccagacgactggccaggg

SEQ ID NO: 2543 - RNA, 23 nt, synthetic construct
  source 1..23: mol_type = other RNA
caccgcccagacgactggccagg

SEQ ID NO: 2544 - RNA, 23 nt, synthetic construct
  source 1..23: mol_type = other RNA
cgccagcccagttgtagcaccgc

SEQ ID NO: 2545 - RNA, 23 nt, synthetic construct
  source 1..23: mol_type = other RNA
ctggccgccagcccagttgtagc

SEQ ID NO: 2546 - RNA, 23 nt, synthetic construct
  source 1..23: mol_type = other RNA
taagaaccatcctggccgccagc

SEQ ID NO: 2547 - RNA, 23 nt, synthetic construct
  source 1..23: mol_type = other RNA
gactggccagggcgcctgtggga

SEQ ID NO: 2548 - RNA, 23 nt, synthetic construct
  source 1..23: mol_type = other RNA
ggcgcagatcaaagagagcctgc

SEQ ID NO: 2549 - RNA, 23 nt, synthetic construct
  source 1..23: mol_type = other RNA
aaccagacggacaagctggccgc

SEQ ID NO: 2550 - RNA, 23 nt, synthetic construct
  source 1..23: mol_type = other RNA
agcaaccagacggacaagctggc

SEQ ID NO: 2551 - RNA, 23 nt, synthetic construct
  source 1..23: mol_type = other RNA
cagcaaccagacggacaagctgg

SEQ ID NO: 2552 - RNA, 23 nt, synthetic construct
  source 1..23: mol_type = other RNA
gcagccagcccggccaggactgc

SEQ ID NO: 2553 - RNA, 23 nt, synthetic construct
  source 1..23: mol_type = other RNA
acacaactgcccaacgggcgtga

SEQ ID NO: 2554 - RNA, 23 nt, synthetic construct
  source 1..23: mol_type = other RNA
tcacacaactgcccaacgggcgt

SEQ ID NO: 2555 - RNA, 23 nt, synthetic construct
  source 1..23: mol_type = other RNA
tgtcacacaactgcccaacgggc

SEQ ID NO: 2556 - RNA, 23 nt, synthetic construct
  source 1..23: mol_type = other RNA
gttccagggcctgtctggggagt

SEQ ID NO: 2557 - RNA, 23 nt, synthetic construct
  source 1..23: mol_type = other RNA
gggttccagggcctgtctgggga

SEQ ID NO: 2558 - RNA, 23 nt, synthetic construct
  source 1..23: mol_type = other RNA
ggggttccagggcctgtctgggg

SEQ ID NO: 2559 - RNA, 23 nt, synthetic construct
  source 1..23: mol_type = other RNA
gcggtaccagtttagcacgaagc

SEQ ID NO: 2560 - RNA, 23 nt, synthetic construct
  source 1..23: mol_type = other RNA
ggccagttccaaaccctggtggt

SEQ ID NO: 2561 - RNA, 23 nt, synthetic construct
  source 1..23: mol_type = other RNA
cggccagttccaaaccctggtgg

SEQ ID NO: 2562 - RNA, 23 nt, synthetic construct
  source 1..23: mol_type = other RNA
gccggccagttccaaaccctggt

SEQ ID NO: 2563 - RNA, 23 nt, synthetic construct
  source 1..23: mol_type = other RNA
agccggccagttccaaaccctgg

SEQ ID NO: 2564 - RNA, 23 nt, synthetic construct
  source 1..23: mol_type = other RNA
ttccaaaccctggtggttggtgt

SEQ ID NO: 2565 - RNA, 23 nt, synthetic construct
  source 1..23: mol_type = other RNA
agttccaaaccctggtggttggt

SEQ ID NO: 2566 - RNA, 23 nt, synthetic construct
  source 1..23: mol_type = other RNA
cagttccaaaccctggtggttgg

SEQ ID NO: 2567 - RNA, 23 nt, synthetic construct
  source 1..23: mol_type = other RNA
gcacgaggtaacgtcatcccagc

SEQ ID NO: 2568 - RNA, 23 nt, synthetic construct
  source 1..23: mol_type = other RNA
gacccagactagcagcaccaggc

SEQ ID NO: 2569 - RNA, 23 nt, synthetic construct
  source 1..23: mol_type = other RNA
ggacccagactagcagcaccagg

SEQ ID NO: 2570 - RNA, 23 nt, synthetic construct
  source 1..23: mol_type = other RNA
ggatttccagtggcgagagaaga

SEQ ID NO: 2571 - RNA, 23 nt, synthetic construct
  source 1..23: mol_type = other RNA
gcccagccactgaggcctgagga

SEQ ID NO: 2572 - RNA, 23 nt, synthetic construct
  source 1..23: mol_type = other RNA
tgcccagccactgaggcctgagg

SEQ ID NO: 2573 - RNA, 23 nt, synthetic construct
  source 1..23: mol_type = other RNA
agtgcccagccactgaggcctga

SEQ ID NO: 2574 - RNA, 23 nt, synthetic construct
  source 1..23: mol_type = other RNA
gtggcgagagaagaccccggagc

SEQ ID NO: 2575 - RNA, 23 nt, synthetic construct
  source 1..23: mol_type = other RNA
cagtggcgagagaagaccccgga

SEQ ID NO: 2576 - RNA, 23 nt, synthetic construct
  source 1..23: mol_type = other RNA
ccagtggcgagagaagaccccgg

SEQ ID NO: 2577 - RNA, 23 nt, synthetic construct
  source 1..23: mol_type = other RNA
tctctcgccactggaaatccagc

SEQ ID NO: 2578 - RNA, 23 nt, synthetic construct
  source 1..23: mol_type = other RNA
gtttcagggattggcagagggga

SEQ ID NO: 2579 - RNA, 23 nt, synthetic construct
  source 1..23: mol_type = other RNA
ggtttcagggattggcagagggg

SEQ ID NO: 2580 - RNA, 23 nt, synthetic construct
  source 1..23: mol_type = other RNA
aggtttcagggattggcagaggg

SEQ ID NO: 2581 - RNA, 23 nt, synthetic construct
  source 1..23: mol_type = other RNA
gaggtttcagggattggcagagg

SEQ ID NO: 2582 - RNA, 23 nt, synthetic construct
  source 1..23: mol_type = other RNA
tctgtccacagagtcatatccgc

SEQ ID NO: 2583 - RNA, 23 nt, synthetic construct
  source 1..23: mol_type = other RNA
gggagcaaaacctggctgcgtgt

SEQ ID NO: 2584 - RNA, 23 nt, synthetic construct
  source 1..23: mol_type = other RNA
ccgggagcaaaacctggctgcgt

SEQ ID NO: 2585 - RNA, 23 nt, synthetic construct
  source 1..23: mol_type = other RNA
caaccaggaacttcttgtgtggt

SEQ ID NO: 2586 - RNA, 23 nt, synthetic construct
  source 1..23: mol_type = other RNA
ccaaccaggaacttcttgtgtgg

SEQ ID NO: 2587 - RNA, 23 nt, synthetic construct
  source 1..23: mol_type = other RNA
tgccaaccaggaacttcttgtgt

SEQ ID NO: 2588 - RNA, 23 nt, synthetic construct
  source 1..23: mol_type = other RNA
ataccacacaagaagttcctggt

SEQ ID NO: 2589 - RNA, 23 nt, synthetic construct
  source 1..23: mol_type = other RNA
aataccacacaagaagttcctgg

SEQ ID NO: 2590 - RNA, 23 nt, synthetic construct
  source 1..23: mol_type = other RNA
acaaacacagagcagtctaaagc

SEQ ID NO: 2591 - RNA, 23 nt, synthetic construct
  source 1..23: mol_type = other RNA
tctaaagcaaccgagcactgaga

SEQ ID NO: 2592 - RNA, 23 nt, synthetic construct
  source 1..23: mol_type = other RNA
ctccagccggagcatcccaggga

SEQ ID NO: 2593 - RNA, 23 nt, synthetic construct
  source 1..23: mol_type = other RNA
gctccagccggagcatcccaggg

SEQ ID NO: 2594 - RNA, 23 nt, synthetic construct
  source 1..23: mol_type = other RNA
tgctccagccggagcatcccagg

SEQ ID NO: 2595 - RNA, 23 nt, synthetic construct
  source 1..23: mol_type = other RNA
gtgcagcccaaagctacctcagc

SEQ ID NO: 2596 - RNA, 23 nt, synthetic construct
  source 1..23: mol_type = other RNA
gaagcagaacggcaagatcaagt

SEQ ID NO: 2597 - RNA, 23 nt, synthetic construct
  source 1..23: mol_type = other RNA
ggccagctctccaatctgaaggt

SEQ ID NO: 2598 - RNA, 23 nt, synthetic construct
  source 1..23: mol_type = other RNA
cggccagctctccaatctgaagg

SEQ ID NO: 2599 - RNA, 23 nt, synthetic construct
  source 1..23: mol_type = other RNA
tttcggccagctctccaatctga

SEQ ID NO: 2600 - RNA, 23 nt, synthetic construct
  source 1..23: mol_type = other RNA
aatgtcagacttgcaacaagggc

SEQ ID NO: 2601 - RNA, 23 nt, synthetic construct
  source 1..23: mol_type = other RNA
aaatgtcagacttgcaacaaggg

SEQ ID NO: 2602 - RNA, 23 nt, synthetic construct
  source 1..23: mol_type = other RNA
caaatgtcagacttgcaacaagg

SEQ ID NO: 2603 - RNA, 23 nt, synthetic construct
  source 1..23: mol_type = other RNA
tactcagctcgcccacctgcaga

SEQ ID NO: 2604 - RNA, 23 nt, synthetic construct
  source 1..23: mol_type = other RNA
ctttactcagctcgcccacctgc

SEQ ID NO: 2605 - RNA, 23 nt, synthetic construct
  source 1..23: mol_type = other RNA
cacctgcagaaacactacctggt

SEQ ID NO: 2606 - RNA, 23 nt, synthetic construct
  source 1..23: mol_type = other RNA
ccacctgcagaaacactacctgg

SEQ ID NO: 2607 - RNA, 23 nt, synthetic construct
  source 1..23: mol_type = other RNA
taccaatgcaaggtgtgccctgc

SEQ ID NO: 2608 - RNA, 23 nt, synthetic construct
  source 1..23: mol_type = other RNA
gttcacccagtttgtgcacctga

SEQ ID NO: 2609 - RNA, 23 nt, synthetic construct
  source 1..23: mol_type = other RNA
ttgcaaagaaacatggggaatgg

SEQ ID NO: 2610 - RNA, 23 nt, synthetic construct
  source 1..23: mol_type = other RNA
gtctttgcaaagaaacatgggga

SEQ ID NO: 2611 - RNA, 23 nt, synthetic construct
  source 1..23: mol_type = other RNA
cctgcgactccattctggagaga

SEQ ID NO: 2612 - RNA, 23 nt, synthetic construct
  source 1..23: mol_type = other RNA
cacctgcgactccattctggaga

SEQ ID NO: 2613 - RNA, 23 nt, synthetic construct
  source 1..23: mol_type = other RNA
acccgaatcaatgaagaaatcga

SEQ ID NO: 2614 - RNA, 23 nt, synthetic construct
  source 1..23: mol_type = other RNA
cgttcagaagtcgggtgagtggt

SEQ ID NO: 2615 - RNA, 23 nt, synthetic construct
  source 1..23: mol_type = other RNA
acgttcagaagtcgggtgagtgg

SEQ ID NO: 2616 - RNA, 23 nt, synthetic construct
  source 1..23: mol_type = other RNA
gcacgttcagaagtcgggtgagt

SEQ ID NO: 2617 - RNA, 23 nt, synthetic construct
  source 1..23: mol_type = other RNA
gcggccacaggcccctgagcagc

SEQ ID NO: 2618 - RNA, 23 nt, synthetic construct
  source 1..23: mol_type = other RNA
gcagcggccacaggcccctgagc

SEQ ID NO: 2619 - RNA, 23 nt, synthetic construct
  source 1..23: mol_type = other RNA
gtccacaggacgatgtgcagcgg

SEQ ID NO: 2620 - RNA, 23 nt, synthetic construct
  source 1..23: mol_type = other RNA
gcgtccacaggacgatgtgcagc

SEQ ID NO: 2621 - RNA, 23 nt, synthetic construct
  source 1..23: mol_type = other RNA
tacgcgtccacaggacgatgtgc

SEQ ID NO: 2622 - RNA, 23 nt, synthetic construct
  source 1..23: mol_type = other RNA
ccacaggaagtctgtgtggctgt

SEQ ID NO: 2623 - RNA, 23 nt, synthetic construct
  source 1..23: mol_type = other RNA
aagccacaggaagtctgtgtggc

SEQ ID NO: 2624 - RNA, 23 nt, synthetic construct
  source 1..23: mol_type = other RNA
gaagccacaggaagtctgtgtgg

SEQ ID NO: 2625 - RNA, 23 nt, synthetic construct
  source 1..23: mol_type = other RNA
ccacaactgtgtaaattttgtga

SEQ ID NO: 2626 - RNA, 23 nt, synthetic construct
  source 1..23: mol_type = other RNA
ttccacaactgtgtaaattttgt

SEQ ID NO: 2627 - RNA, 23 nt, synthetic construct
  source 1..23: mol_type = other RNA
acaaccagaaatcctgcatgagc

SEQ ID NO: 2628 - RNA, 23 nt, synthetic construct
  source 1..23: mol_type = other RNA
tgacaaccagaaatcctgcatga

SEQ ID NO: 2629 - RNA, 23 nt, synthetic construct
  source 1..23: mol_type = other RNA
tgcttaccatacagccacacaga

SEQ ID NO: 2630 - RNA, 23 nt, synthetic construct
  source 1..23: mol_type = other RNA
tatttcaagtgacaggcatcagc

SEQ ID NO: 2631 - RNA, 23 nt, synthetic construct
  source 1..23: mol_type = other RNA
gaagcagaacacttcagagcagt

SEQ ID NO: 2632 - RNA, 23 nt, synthetic construct
  source 1..23: mol_type = other RNA
gctgaagcagaacacttcagagc

SEQ ID NO: 2633 - RNA, 23 nt, synthetic construct
  source 1..23: mol_type = other RNA
gagcagtttgagacagtggcagt

SEQ ID NO: 2634 - RNA, 23 nt, synthetic construct
  source 1..23: mol_type = other RNA
tcagagcagtttgagacagtggc

SEQ ID NO: 2635 - RNA, 23 nt, synthetic construct
  source 1..23: mol_type = other RNA
ttcagagcagtttgagacagtgg

SEQ ID NO: 2636 - RNA, 23 nt, synthetic construct
  source 1..23: mol_type = other RNA
ctccagttcctgacggctgagga

SEQ ID NO: 2637 - RNA, 23 nt, synthetic construct
  source 1..23: mol_type = other RNA
actccagttcctgacggctgagg

SEQ ID NO: 2638 - RNA, 23 nt, synthetic construct
  source 1..23: mol_type = other RNA
atactccagttcctgacggctga

SEQ ID NO: 2639 - RNA, 23 nt, synthetic construct
  source 1..23: mol_type = other RNA
aaacaatactggctgatcaccgc

SEQ ID NO: 2640 - RNA, 23 nt, synthetic construct
  source 1..23: mol_type = other RNA
cctacaggagtacctgacgcggc

SEQ ID NO: 2641 - RNA, 23 nt, synthetic construct
  source 1..23: mol_type = other RNA
acctacaggagtacctgacgcgg

SEQ ID NO: 2642 - RNA, 23 nt, synthetic construct
  source 1..23: mol_type = other RNA
caacctacaggagtacctgacgc

SEQ ID NO: 2643 - RNA, 23 nt, synthetic construct
  source 1..23: mol_type = other RNA
tgggcaggtaagttagagctagt

SEQ ID NO: 2644 - RNA, 23 nt, synthetic construct
  source 1..23: mol_type = other RNA
cggtttcccaggttgaactcagc

SEQ ID NO: 2645 - RNA, 23 nt, synthetic construct
  source 1..23: mol_type = other RNA
tcccagctgatgacatgccgcgt

SEQ ID NO: 2646 - RNA, 23 nt, synthetic construct
  source 1..23: mol_type = other RNA
cctcccagctgatgacatgccgc

SEQ ID NO: 2647 - RNA, 23 nt, synthetic construct
  source 1..23: mol_type = other RNA
ggtcctcccagctgatgacatgc

SEQ ID NO: 2648 - RNA, 23 nt, synthetic construct
  source 1..23: mol_type = other RNA
tcccagagcaccagagccatgga

SEQ ID NO: 2649 - RNA, 23 nt, synthetic construct
  source 1..23: mol_type = other RNA
ttcccagagcaccagagccatgg

SEQ ID NO: 2650 - RNA, 23 nt, synthetic construct
  source 1..23: mol_type = other RNA
accaccaggtaaggagtgagtgt

SEQ ID NO: 2651 - RNA, 23 nt, synthetic construct
  source 1..23: mol_type = other RNA
caaccaccaggtaaggagtgagt

SEQ ID NO: 2652 - RNA, 23 nt, synthetic construct
  source 1..23: mol_type = other RNA
gagggcgaccagaaattcccagc

SEQ ID NO: 2653 - RNA, 23 nt, synthetic construct
  source 1..23: mol_type = other RNA
agccagaagctgggaatttctgg

SEQ ID NO: 2654 - RNA, 23 nt, synthetic construct
  source 1..23: mol_type = other RNA
catccagatggtgtgtgagacgt

SEQ ID NO: 2655 - RNA, 23 nt, synthetic construct
  source 1..23: mol_type = other RNA
gggcatccagatggtgtgtgaga

SEQ ID NO: 2656 - RNA, 23 nt, synthetic construct
  source 1..23: mol_type = other RNA
cagcccagtgtgtggcagaacgc

SEQ ID NO: 2657 - RNA, 23 nt, synthetic construct
  source 1..23: mol_type = other RNA
tggtcccagcactcagtcaacgt

SEQ ID NO: 2658 - RNA, 23 nt, synthetic construct
  source 1..23: mol_type = other RNA
atccagaaccctgaccctgccgt

SEQ ID NO: 2659 - RNA, 23 nt, synthetic construct
  source 1..23: mol_type = other RNA
tcacaaagtaaggattctgatgt

SEQ ID NO: 2660 - RNA, 23 nt, synthetic construct
  source 1..23: mol_type = other RNA
gtgtcacaaagtaaggattctga

SEQ ID NO: 2661 - RNA, 23 nt, synthetic construct
  source 1..23: mol_type = other RNA
gctccaggccacagcactgttgc

SEQ ID NO: 2662 - RNA, 23 nt, synthetic construct
  source 1..23: mol_type = other RNA
gttgctccaggccacagcactgt

SEQ ID NO: 2663 - RNA, 23 nt, synthetic construct
  source 1..23: mol_type = other RNA
tttcaaaacctgtcagtgattgg

SEQ ID NO: 2664 - RNA, 23 nt, synthetic construct
  source 1..23: mol_type = other RNA
aaactttcaaaacctgtcagtga

SEQ ID NO: 2665 - RNA, 23 nt, synthetic construct
  source 1..23: mol_type = other RNA
ttccgaatcctcctcctgaaagt

SEQ ID NO: 2666 - RNA, 23 nt, synthetic construct
  source 1..23: mol_type = other RNA
tgggttccgaatcctcctcctga

SEQ ID NO: 2667 - RNA, 23 nt, synthetic construct
  source 1..23: mol_type = other RNA
ggaccacagccgcagcgtcatga

SEQ ID NO: 2668 - RNA, 23 nt, synthetic construct
  source 1..23: mol_type = other RNA
ggctcccaggtgtcatcagcagc

SEQ ID NO: 2669 - RNA, 23 nt, synthetic construct
  source 1..23: mol_type = other RNA
tgccttccagtaagatttggtgt

SEQ ID NO: 2670 - RNA, 23 nt, synthetic construct
  source 1..23: mol_type = other RNA
gggccgcagtggcgactcggcgc

SEQ ID NO: 2671 - RNA, 23 nt, synthetic construct
  source 1..23: mol_type = other RNA
gctccccaggccctggcccgggc

SEQ ID NO: 2672 - RNA, 23 nt, synthetic construct
  source 1..23: mol_type = other RNA
cgctccccaggccctggcccggg

SEQ ID NO: 2673 - RNA, 23 nt, synthetic construct
  source 1..23: mol_type = other RNA
cgggcaggggccggagcccgcgc

SEQ ID NO: 2674 - RNA, 23 nt, synthetic construct
  source 1..23: mol_type = other RNA
cgcgggcaggggccggagcccgc

SEQ ID NO: 2675 - RNA, 23 nt, synthetic construct
  source 1..23: mol_type = other RNA
gtggcgactcggcgctcggaagc

SEQ ID NO: 2676 - RNA, 23 nt, synthetic construct
  source 1..23: mol_type = other RNA
gcagtggcgactcggcgctcgga

SEQ ID NO: 2677 - RNA, 23 nt, synthetic construct
  source 1..23: mol_type = other RNA
cgccgaggcgccgaggagagcgg

SEQ ID NO: 2678 - RNA, 23 nt, synthetic construct
  source 1..23: mol_type = other RNA
ctcgccgaggcgccgaggagagc

SEQ ID NO: 2679 - RNA, 23 nt, synthetic construct
  source 1..23: mol_type = other RNA
agctcgccgaggcgccgaggaga

SEQ ID NO: 2680 - RNA, 23 nt, synthetic construct
  source 1..23: mol_type = other RNA
gtccatgagcccggcttccgagc

SEQ ID NO: 2681 - RNA, 23 nt, synthetic construct
  source 1..23: mol_type = other RNA
ccgtccatgagcccggcttccga

SEQ ID NO: 2682 - RNA, 23 nt, synthetic construct
  source 1..23: mol_type = other RNA
atgcacccaagacagcagaaagt

SEQ ID NO: 2683 - RNA, 23 nt, synthetic construct
  source 1..23: mol_type = other RNA
ggctccaatgcacccaagacagc

SEQ ID NO: 2684 - RNA, 23 nt, synthetic construct
  source 1..23: mol_type = other RNA
tcccaggctgcacccatggcaga

SEQ ID NO: 2685 - RNA, 23 nt, synthetic construct
  source 1..23: mol_type = other RNA
tggtcccaggctgcacccatggc

SEQ ID NO: 2686 - RNA, 23 nt, synthetic construct
  source 1..23: mol_type = other RNA
gtggtcccaggctgcacccatgg

SEQ ID NO: 2687 - RNA, 23 nt, synthetic construct
  source 1..23: mol_type = other RNA
gggcagaatcatcacgaaggtga

SEQ ID NO: 2688 - RNA, 23 nt, synthetic construct
  source 1..23: mol_type = other RNA
gagggcagaatcatcacgaaggt

SEQ ID NO: 2689 - RNA, 23 nt, synthetic construct
  source 1..23: mol_type = other RNA
ggagggcagaatcatcacgaagg

SEQ ID NO: 2690 - RNA, 23 nt, synthetic construct
  source 1..23: mol_type = other RNA
ggaccactgaggacagaaagaga

SEQ ID NO: 2691 - RNA, 23 nt, synthetic construct
  source 1..23: mol_type = other RNA
tgggaccactgaggacagaaaga

SEQ ID NO: 2692 - RNA, 23 nt, synthetic construct
  source 1..23: mol_type = other RNA
cttccaggagtaccctgatgaga

SEQ ID NO: 2693 - RNA, 23 nt, synthetic construct
  source 1..23: mol_type = other RNA
atcttccaggagtaccctgatga

SEQ ID NO: 2694 - RNA, 23 nt, synthetic construct
  source 1..23: mol_type = other RNA
catgcaggtgggcatctttggga

SEQ ID NO: 2695 - RNA, 23 nt, synthetic construct
  source 1..23: mol_type = other RNA
ccatgcaggtgggcatctttggg

SEQ ID NO: 2696 - RNA, 23 nt, synthetic construct
  source 1..23: mol_type = other RNA
accatgcaggtgggcatctttgg

SEQ ID NO: 2697 - RNA, 23 nt, synthetic construct
  source 1..23: mol_type = other RNA
caccaaggccagcacataggaga

SEQ ID NO: 2698 - RNA, 23 nt, synthetic construct
  source 1..23: mol_type = other RNA
ctcaccaaggccagcacatagga

SEQ ID NO: 2699 - RNA, 23 nt, synthetic construct
  source 1..23: mol_type = other RNA
cctcaccaaggccagcacatagg

SEQ ID NO: 2700 - RNA, 23 nt, synthetic construct
  source 1..23: mol_type = other RNA
aggccagcacataggagagatga

SEQ ID NO: 2701 - RNA, 23 nt, synthetic construct
  source 1..23: mol_type = other RNA
ccaaggccagcacataggagaga

SEQ ID NO: 2702 - RNA, 23 nt, synthetic construct
  source 1..23: mol_type = other RNA
ttcctacagcacaacaaatgtga

SEQ ID NO: 2703 - RNA, 23 nt, synthetic construct
  source 1..23: mol_type = other RNA
gcaagacaagaaaagtaagtggc

SEQ ID NO: 2704 - RNA, 23 nt, synthetic construct
  source 1..23: mol_type = other RNA
agcaagacaagaaaagtaagtgg

SEQ ID NO: 2705 - RNA, 23 nt, synthetic construct
  source 1..23: mol_type = other RNA
agttcgaggaaagggaaaggggc

SEQ ID NO: 2706 - RNA, 23 nt, synthetic construct
  source 1..23: mol_type = other RNA
cagttcgaggaaagggaaagggg

SEQ ID NO: 2707 - RNA, 23 nt, synthetic construct
  source 1..23: mol_type = other RNA
tcagttcgaggaaagggaaaggg

SEQ ID NO: 2708 - RNA, 23 nt, synthetic construct
  source 1..23: mol_type = other RNA
atcagttcgaggaaagggaaagg

SEQ ID NO: 2709 - RNA, 23 nt, synthetic construct
  source 1..23: mol_type = other RNA
acgctccaggacttataccggga

SEQ ID NO: 2710 - RNA, 23 nt, synthetic construct
  source 1..23: mol_type = other RNA
cacgctccaggacttataccggg

SEQ ID NO: 2711 - RNA, 23 nt, synthetic construct
  source 1..23: mol_type = other RNA
gctccagggcattagacagcagc

SEQ ID NO: 2712 - RNA, 23 nt, synthetic construct
  source 1..23: mol_type = other RNA
gaggctccagggcattagacagc

SEQ ID NO: 2713 - RNA, 23 nt, synthetic construct
  source 1..23: mol_type = other RNA
ttgtacaagatccgcagacgtgt

SEQ ID NO: 2714 - RNA, 23 nt, synthetic construct
  source 1..23: mol_type = other RNA
gtttgtacaagatccgcagacgt

SEQ ID NO: 2715 - RNA, 23 nt, synthetic construct
  source 1..23: mol_type = other RNA
gcgaggcagcttgagttaaacga

SEQ ID NO: 2716 - RNA, 23 nt, synthetic construct
  source 1..23: mol_type = other RNA
aagtggacgtaggtgttgaaagc

SEQ ID NO: 2717 - RNA, 23 nt, synthetic construct
  source 1..23: mol_type = other RNA
tgtatgtacacccggtcacctgc

SEQ ID NO: 2718 - RNA, 23 nt, synthetic construct
  source 1..23: mol_type = other RNA
aacagacactgaggtgctgttgt

SEQ ID NO: 2719 - RNA, 23 nt, synthetic construct
  source 1..23: mol_type = other RNA
agttttgagttgagttcaagtga

SEQ ID NO: 2720 - RNA, 23 nt, synthetic construct
  source 1..23: mol_type = other RNA
caagttttgagttgagttcaagt

SEQ ID NO: 2721 - RNA, 23 nt, synthetic construct
  source 1..23: mol_type = other RNA
actttaagtgaagttacttctgg

SEQ ID NO: 2722 - RNA, 23 nt, synthetic construct
  source 1..23: mol_type = other RNA
taagtgaagttacttctgggtgt

SEQ ID NO: 2723 - RNA, 23 nt, synthetic construct
  source 1..23: mol_type = other RNA
tttaagtgaagttacttctgggt

SEQ ID NO: 2724 - RNA, 23 nt, synthetic construct
  source 1..23: mol_type = other RNA
ctttaagtgaagttacttctggg

SEQ ID NO: 2725 - RNA, 23 nt, synthetic construct
  source 1..23: mol_type = other RNA
aatcaaatgatgaattgtcttga

SEQ ID NO: 2726 - RNA, 23 nt, synthetic construct
  source 1..23: mol_type = other RNA
gcaaatcttgattttggctctgg

SEQ ID NO: 2727 - RNA, 23 nt, synthetic construct
  source 1..23: mol_type = other RNA
aatcttgattttggctctggaga

SEQ ID NO: 2728 - RNA, 23 nt, synthetic construct
  source 1..23: mol_type = other RNA
caaatcttgattttggctctgga

SEQ ID NO: 2729 - RNA, 23 nt, synthetic construct
  source 1..23: mol_type = other RNA
tttacctgatataacatcacagt

SEQ ID NO: 2730 - RNA, 23 nt, synthetic construct
  source 1..23: mol_type = other RNA
tttgtgatccatctattcgatgt

SEQ ID NO: 2731 - RNA, 23 nt, synthetic construct
  source 1..23: mol_type = other RNA
agttttgtgatccatctattcga

SEQ ID NO: 2732 - RNA, 23 nt, synthetic construct
  source 1..23: mol_type = other RNA
ccatatttgtagttctcccacgt

SEQ ID NO: 2733 - RNA, 23 nt, synthetic construct
  source 1..23: mol_type = other RNA
aagatacctgaataaccctctgg

SEQ ID NO: 2734 - RNA, 23 nt, synthetic construct
  source 1..23: mol_type = other RNA
agatacctgaataaccctctgga

SEQ ID NO: 2735 - RNA, 23 nt, synthetic construct
  source 1..23: mol_type = other RNA
tatggagtatatcttctctaggc

SEQ ID NO: 2736 - RNA, 23 nt, synthetic construct
  source 1..23: mol_type = other RNA
ctatggagtatatcttctctagg

SEQ ID NO: 2737 - RNA, 23 nt, synthetic construct
  source 1..23: mol_type = other RNA
cattttggttgattttatagagt

SEQ ID NO: 2738 - RNA, 23 nt, synthetic construct
  source 1..23: mol_type = other RNA
gctttctgaatctgttggatgga

SEQ ID NO: 2739 - RNA, 23 nt, synthetic construct
  source 1..23: mol_type = other RNA
agctttctgaatctgttggatgg

SEQ ID NO: 2740 - RNA, 23 nt, synthetic construct
  source 1..23: mol_type = other RNA
tcggcctctgaagctcctgagga

SEQ ID NO: 2741 - RNA, 23 nt, synthetic construct
  source 1..23: mol_type = other RNA
ctcggcctctgaagctcctgagg

SEQ ID NO: 2742 - RNA, 23 nt, synthetic construct
  source 1..23: mol_type = other RNA
cctctgaagctcctgaggaaaga

SEQ ID NO: 2743 - RNA, 23 nt, synthetic construct
  source 1..23: mol_type = other RNA
gtgcttcatgtaaccctgcatga

SEQ ID NO: 2744 - RNA, 23 nt, synthetic construct
  source 1..23: mol_type = other RNA
cttcatgtaaccctgcatgaagc

SEQ ID NO: 2745 - RNA, 23 nt, synthetic construct
  source 1..23: mol_type = other RNA
agccacggctgaagttggtctga

SEQ ID NO: 2746 - RNA, 23 nt, synthetic construct
  source 1..23: mol_type = other RNA
ggtgctccagtagtctttcaggg

SEQ ID NO: 2747 - RNA, 23 nt, synthetic construct
  source 1..23: mol_type = other RNA
cggtgctccagtagtctttcagg

SEQ ID NO: 2748 - RNA, 23 nt, synthetic construct
  source 1..23: mol_type = other RNA
gtgctccagtagtctttcaggga

SEQ ID NO: 2749 - RNA, 23 nt, synthetic construct
  source 1..23: mol_type = other RNA
gggctgtgacaaagtcacatggt

SEQ ID NO: 2750 - RNA, 23 nt, synthetic construct
  source 1..23: mol_type = other RNA
tgggctgtgacaaagtcacatgg

SEQ ID NO: 2751 - RNA, 23 nt, synthetic construct
  source 1..23: mol_type = other RNA
aaatttgactttccattctctgc

SEQ ID NO: 2752 - RNA, 23 nt, synthetic construct
  source 1..23: mol_type = other RNA
cgtgagtaaacctgaatctttgg

SEQ ID NO: 2753 - RNA, 23 nt, synthetic construct
  source 1..23: mol_type = other RNA
gtgtagtacaagagatagaaaga

SEQ ID NO: 2754 - RNA, 23 nt, synthetic construct
  source 1..23: mol_type = other RNA
tgaattcagtgtagtacaagaga

SEQ ID NO: 2755 - RNA, 23 nt, synthetic construct
  source 1..23: mol_type = other RNA
ttcagtgtagtacaagagataga

SEQ ID NO: 2756 - RNA, 23 nt, synthetic construct
  source 1..23: mol_type = other RNA
cactctgaggtgcttttctgtgc

SEQ ID NO: 2757 - RNA, 23 nt, synthetic construct
  source 1..23: mol_type = other RNA
tccactctgaggtgcttttctgt

SEQ ID NO: 2758 - RNA, 23 nt, synthetic construct
  source 1..23: mol_type = other RNA
tgtctgaggaagcagcttccagg

SEQ ID NO: 2759 - RNA, 23 nt, synthetic construct
  source 1..23: mol_type = other RNA
tcactgactcctgcacttgcagc

SEQ ID NO: 2760 - RNA, 23 nt, synthetic construct
  source 1..23: mol_type = other RNA
ccgtcactgactcctgcacttgc

SEQ ID NO: 2761 - RNA, 23 nt, synthetic construct
  source 1..23: mol_type = other RNA
gtcgtagtagggtatgggatgga

SEQ ID NO: 2762 - RNA, 23 nt, synthetic construct
  source 1..23: mol_type = other RNA
tgtcgtagtagggtatgggatgg

SEQ ID NO: 2763 - RNA, 23 nt, synthetic construct
  source 1..23: mol_type = other RNA
gttcttgtcgtagtagggtatgg

SEQ ID NO: 2764 - RNA, 23 nt, synthetic construct
  source 1..23: mol_type = other RNA
tcttgtcgtagtagggtatggga

SEQ ID NO: 2765 - RNA, 23 nt, synthetic construct
  source 1..23: mol_type = other RNA
ttcttgtcgtagtagggtatggg

SEQ ID NO: 2766 - RNA, 23 nt, synthetic construct
  source 1..23: mol_type = other RNA
aaccagtaaccatgaactgggga

SEQ ID NO: 2767 - RNA, 23 nt, synthetic construct
  source 1..23: mol_type = other RNA
gaaccagtaaccatgaactgggg

SEQ ID NO: 2768 - RNA, 23 nt, synthetic construct
  source 1..23: mol_type = other RNA
ggaaccagtaaccatgaactggg

SEQ ID NO: 2769 - RNA, 23 nt, synthetic construct
  source 1..23: mol_type = other RNA
cggaaccagtaaccatgaactgg

SEQ ID NO: 2770 - RNA, 23 nt, synthetic construct
  source 1..23: mol_type = other RNA
gggagatttgtaactgtatttgg

SEQ ID NO: 2771 - RNA, 23 nt, synthetic construct
  source 1..23: mol_type = other RNA
ggagatttgtaactgtatttggt

SEQ ID NO: 2772 - RNA, 23 nt, synthetic construct
  source 1..23: mol_type = other RNA
ggcagctgacaaccaggagaaga

SEQ ID NO: 2773 - RNA, 23 nt, synthetic construct
  source 1..23: mol_type = other RNA
ttcctacctgagccatctcctgg

SEQ ID NO: 2774 - RNA, 23 nt, synthetic construct
  source 1..23: mol_type = other RNA
tcctacctgagccatctcctgga

SEQ ID NO: 2775 - RNA, 23 nt, synthetic construct
  source 1..23: mol_type = other RNA
ggggaggctgaccctgtggtagg

SEQ ID NO: 2776 - RNA, 23 nt, synthetic construct
  source 1..23: mol_type = other RNA
aggctgaccctgtggtagggtgg

SEQ ID NO: 2777 - RNA, 23 nt, synthetic construct
  source 1..23: mol_type = other RNA
ggaggctgaccctgtggtagggt

SEQ ID NO: 2778 - RNA, 23 nt, synthetic construct
  source 1..23: mol_type = other RNA
gggaggctgaccctgtggtaggg

SEQ ID NO: 2779 - RNA, 23 nt, synthetic construct
  source 1..23: mol_type = other RNA
gaacagcttgaggtttcagtggg

SEQ ID NO: 2780 - RNA, 23 nt, synthetic construct
  source 1..23: mol_type = other RNA
tgaacagcttgaggtttcagtgg

SEQ ID NO: 2781 - RNA, 23 nt, synthetic construct
  source 1..23: mol_type = other RNA
acagcttgaggtttcagtggggc

SEQ ID NO: 2782 - RNA, 23 nt, synthetic construct
  source 1..23: mol_type = other RNA
aacagcttgaggtttcagtgggg

SEQ ID NO: 2783 - RNA, 23 nt, synthetic construct
  source 1..23: mol_type = other RNA
gcggcacctgaacagcttgaggt

SEQ ID NO: 2784 - RNA, 23 nt, synthetic construct
  source 1..23: mol_type = other RNA
ggcggcacctgaacagcttgagg

SEQ ID NO: 2785 - RNA, 23 nt, synthetic construct
  source 1..23: mol_type = other RNA
ctgacctctgagtattcggtgga

SEQ ID NO: 2786 - RNA, 23 nt, synthetic construct
  source 1..23: mol_type = other RNA
cctgacctctgagtattcggtgg

SEQ ID NO: 2787 - RNA, 23 nt, synthetic construct
  source 1..23: mol_type = other RNA
gacctctgagtattcggtggagg

SEQ ID NO: 2788 - RNA, 23 nt, synthetic construct
  source 1..23: mol_type = other RNA
ctctgagtattcggtggaggtgt

SEQ ID NO: 2789 - RNA, 23 nt, synthetic construct
  source 1..23: mol_type = other RNA
acctctgagtattcggtggaggt

SEQ ID NO: 2790 - RNA, 23 nt, synthetic construct
  source 1..23: mol_type = other RNA
catgtccgtgtacacttctttgt

SEQ ID NO: 2791 - RNA, 23 nt, synthetic construct
  source 1..23: mol_type = other RNA
tccgtgtacacttctttgtaggg

SEQ ID NO: 2792 - RNA, 23 nt, synthetic construct
  source 1..23: mol_type = other RNA
gtccgtgtacacttctttgtagg

SEQ ID NO: 2793 - RNA, 23 nt, synthetic construct
  source 1..23: mol_type = other RNA
ggtgcgtaggcagctgcctcagg

SEQ ID NO: 2794 - RNA, 23 nt, synthetic construct
  source 1..23: mol_type = other RNA
gccgcacctcgtacaccagccgc

SEQ ID NO: 2795 - RNA, 23 nt, synthetic construct
  source 1..23: mol_type = other RNA
acctcgtacaccagccgctctgc

SEQ ID NO: 2796 - RNA, 23 nt, synthetic construct
  source 1..23: mol_type = other RNA
cgtactggtacgcacactccaga

SEQ ID NO: 2797 - RNA, 23 nt, synthetic construct
  source 1..23: mol_type = other RNA
gtaggactggtagccgtcgtcgt

SEQ ID NO: 2798 - RNA, 23 nt, synthetic construct
  source 1..23: mol_type = other RNA
ggactggtagccgtcgtcgtcgt

SEQ ID NO: 2799 - RNA, 23 nt, synthetic construct
  source 1..23: mol_type = other RNA
gatggtgcagtaggactggtagc

SEQ ID NO: 2800 - RNA, 23 nt, synthetic construct
  source 1..23: mol_type = other RNA
ggtgcagtaggactggtagccgt

SEQ ID NO: 2801 - RNA, 23 nt, synthetic construct
  source 1..23: mol_type = other RNA
cccgcacatgtagcagttccagg

SEQ ID NO: 2802 - RNA, 23 nt, synthetic construct
  source 1..23: mol_type = other RNA
gcacatgtagcagttccaggggt

SEQ ID NO: 2803 - RNA, 23 nt, synthetic construct
  source 1..23: mol_type = other RNA
cgcacatgtagcagttccagggg

SEQ ID NO: 2804 - RNA, 23 nt, synthetic construct
  source 1..23: mol_type = other RNA
ccgcacatgtagcagttccaggg

SEQ ID NO: 2805 - RNA, 23 nt, synthetic construct
  source 1..23: mol_type = other RNA
cagcagcccgtaggtacccttgt

SEQ ID NO: 2806 - RNA, 23 nt, synthetic construct
  source 1..23: mol_type = other RNA
gcagcccgtaggtacccttgtgc

SEQ ID NO: 2807 - RNA, 23 nt, synthetic construct
  source 1..23: mol_type = other RNA
ggacaggtgggtaaacctttgga

SEQ ID NO: 2808 - RNA, 23 nt, synthetic construct
  source 1..23: mol_type = other RNA
aggtgggtaaacctttggagggt

SEQ ID NO: 2809 - RNA, 23 nt, synthetic construct
  source 1..23: mol_type = other RNA
caggtgggtaaacctttggaggg

SEQ ID NO: 2810 - RNA, 23 nt, synthetic construct
  source 1..23: mol_type = other RNA
acaggtgggtaaacctttggagg

SEQ ID NO: 2811 - RNA, 23 nt, synthetic construct
  source 1..23: mol_type = other RNA
aggcaatgtagcggtccacctga

SEQ ID NO: 2812 - RNA, 23 nt, synthetic construct
  source 1..23: mol_type = other RNA
gtacctaccgtagaggcccttgc

SEQ ID NO: 2813 - RNA, 23 nt, synthetic construct
  source 1..23: mol_type = other RNA
ctaccgtagaggcccttgcgagc

SEQ ID NO: 2814 - RNA, 23 nt, synthetic construct
  source 1..23: mol_type = other RNA
acctaccgtagaggcccttgcga

SEQ ID NO: 2815 - RNA, 23 nt, synthetic construct
  source 1..23: mol_type = other RNA
caggaggcggtagaactcaaaga

SEQ ID NO: 2816 - RNA, 23 nt, synthetic construct
  source 1..23: mol_type = other RNA
gaggcggtagaactcaaagaaga

SEQ ID NO: 2817 - RNA, 23 nt, synthetic construct
  source 1..23: mol_type = other RNA
tgtgcagctgacacttctttggc

SEQ ID NO: 2818 - RNA, 23 nt, synthetic construct
  source 1..23: mol_type = other RNA
gtgtgcagctgacacttctttgg

SEQ ID NO: 2819 - RNA, 23 nt, synthetic construct
  source 1..23: mol_type = other RNA
accccagaagtagcgggccctgt

SEQ ID NO: 2820 - RNA, 23 nt, synthetic construct
  source 1..23: mol_type = other RNA
cagaagtagcgggccctgtgtgc

SEQ ID NO: 2821 - RNA, 23 nt, synthetic construct
  source 1..23: mol_type = other RNA
cccagaagtagcgggccctgtgt

SEQ ID NO: 2822 - RNA, 23 nt, synthetic construct
  source 1..23: mol_type = other RNA
gagtttgacctcgtagtaatggt

SEQ ID NO: 2823 - RNA, 23 nt, synthetic construct
  source 1..23: mol_type = other RNA
ggagtttgacctcgtagtaatgg

SEQ ID NO: 2824 - RNA, 23 nt, synthetic construct
  source 1..23: mol_type = other RNA
cgctccatgaccggcccagcagt

SEQ ID NO: 2825 - RNA, 23 nt, synthetic construct
  source 1..23: mol_type = other RNA
gctcttgaggcttcaggcagggt

SEQ ID NO: 2826 - RNA, 23 nt, synthetic construct
  source 1..23: mol_type = other RNA
tgctcttgaggcttcaggcaggg

SEQ ID NO: 2827 - RNA, 23 nt, synthetic construct
  source 1..23: mol_type = other RNA
ctgctcttgaggcttcaggcagg

SEQ ID NO: 2828 - RNA, 23 nt, synthetic construct
  source 1..23: mol_type = other RNA
gcgcctgagtcctgggccatgga

SEQ ID NO: 2829 - RNA, 23 nt, synthetic construct
  source 1..23: mol_type = other RNA
ggcgcctgagtcctgggccatgg

SEQ ID NO: 2830 - RNA, 23 nt, synthetic construct
  source 1..23: mol_type = other RNA
taatagctctgaggcgcctgagt

SEQ ID NO: 2831 - RNA, 23 nt, synthetic construct
  source 1..23: mol_type = other RNA
gctctgaggcgcctgagtcctgg

SEQ ID NO: 2832 - RNA, 23 nt, synthetic construct
  source 1..23: mol_type = other RNA
gctcacctcgtactctggctcgt

SEQ ID NO: 2833 - RNA, 23 nt, synthetic construct
  source 1..23: mol_type = other RNA
acttaccactgagaatttgccgt

SEQ ID NO: 2834 - RNA, 23 nt, synthetic construct
  source 1..23: mol_type = other RNA
ctgcttgttgtacgtggcctggt

SEQ ID NO: 2835 - RNA, 23 nt, synthetic construct
  source 1..23: mol_type = other RNA
gctgcttgttgtacgtggcctgg

SEQ ID NO: 2836 - RNA, 23 nt, synthetic construct
  source 1..23: mol_type = other RNA
cttgttgtacgtggcctggtgga

SEQ ID NO: 2837 - RNA, 23 nt, synthetic construct
  source 1..23: mol_type = other RNA
gcttgttgtacgtggcctggtgg

SEQ ID NO: 2838 - RNA, 23 nt, synthetic construct
  source 1..23: mol_type = other RNA
tggctttgcggtacatgggctgc

SEQ ID NO: 2839 - RNA, 23 nt, synthetic construct
  source 1..23: mol_type = other RNA
tttgcggtacatgggctgcttgt

SEQ ID NO: 2840 - RNA, 23 nt, synthetic construct
  source 1..23: mol_type = other RNA
caggacctcgtagatggctttgc

SEQ ID NO: 2841 - RNA, 23 nt, synthetic construct
  source 1..23: mol_type = other RNA
gacctcgtagatggctttgcggt

SEQ ID NO: 2842 - RNA, 23 nt, synthetic construct
  source 1..23: mol_type = other RNA
ggacctcgtagatggctttgcgg

SEQ ID NO: 2843 - RNA, 23 nt, synthetic construct
  source 1..23: mol_type = other RNA
tttcaggtacctgtagggtgggc

SEQ ID NO: 2844 - RNA, 23 nt, synthetic construct
  source 1..23: mol_type = other RNA
ttttcaggtacctgtagggtggg

SEQ ID NO: 2845 - RNA, 23 nt, synthetic construct
  source 1..23: mol_type = other RNA
ttgtagtacgtggagggaacaga

SEQ ID NO: 2846 - RNA, 23 nt, synthetic construct
  source 1..23: mol_type = other RNA
cagttgtttgtagtacgtggagg

SEQ ID NO: 2847 - RNA, 23 nt, synthetic construct
  source 1..23: mol_type = other RNA
gttgtttgtagtacgtggaggga

SEQ ID NO: 2848 - RNA, 23 nt, synthetic construct
  source 1..23: mol_type = other RNA
agttgtttgtagtacgtggaggg

SEQ ID NO: 2849 - RNA, 23 nt, synthetic construct
  source 1..23: mol_type = other RNA
tttctcgtcgtagtccaccagga

SEQ ID NO: 2850 - RNA, 23 nt, synthetic construct
  source 1..23: mol_type = other RNA
ctttctcgtcgtagtccaccagg

SEQ ID NO: 2851 - RNA, 23 nt, synthetic construct
  source 1..23: mol_type = other RNA
ctgcaggaggtagcctttctcgt

SEQ ID NO: 2852 - RNA, 23 nt, synthetic construct
  source 1..23: mol_type = other RNA
caggaggtagcctttctcgtcgt

SEQ ID NO: 2853 - RNA, 23 nt, synthetic construct
  source 1..23: mol_type = other RNA
cttgaacagtgagttgaagttgc

SEQ ID NO: 2854 - RNA, 23 nt, synthetic construct
  source 1..23: mol_type = other RNA
aacagtgagttgaagttgccggc

SEQ ID NO: 2855 - RNA, 23 nt, synthetic construct
  source 1..23: mol_type = other RNA
gaacagtgagttgaagttgccgg

SEQ ID NO: 2856 - RNA, 23 nt, synthetic construct
  source 1..23: mol_type = other RNA
tcactgtaagtcgtctaaggaga

SEQ ID NO: 2857 - RNA, 23 nt, synthetic construct
  source 1..23: mol_type = other RNA
tgtcactgtaagtcgtctaagga

SEQ ID NO: 2858 - RNA, 23 nt, synthetic construct
  source 1..23: mol_type = other RNA
ttgtcactgtaagtcgtctaagg

SEQ ID NO: 2859 - RNA, 23 nt, synthetic construct
  source 1..23: mol_type = other RNA
cttgctgcagtagaatgacgtgg

SEQ ID NO: 2860 - RNA, 23 nt, synthetic construct
  source 1..23: mol_type = other RNA
ttgctgcagtagaatgacgtggc

SEQ ID NO: 2861 - RNA, 23 nt, synthetic construct
  source 1..23: mol_type = other RNA
ccaggcccctgtaggctagaggt

SEQ ID NO: 2862 - RNA, 23 nt, synthetic construct
  source 1..23: mol_type = other RNA
tgagtgaccctccacacaggtgc

SEQ ID NO: 2863 - RNA, 23 nt, synthetic construct
  source 1..23: mol_type = other RNA
tatgagtgaccctccacacaggt

SEQ ID NO: 2864 - RNA, 23 nt, synthetic construct
  source 1..23: mol_type = other RNA
ctatgagtgaccctccacacagg

SEQ ID NO: 2865 - RNA, 23 nt, synthetic construct
  source 1..23: mol_type = other RNA
aatgtctgacagatttaaaatgc

SEQ ID NO: 2866 - RNA, 23 nt, synthetic construct
  source 1..23: mol_type = other RNA
attcccttctgagactttatagt

SEQ ID NO: 2867 - RNA, 23 nt, synthetic construct
  source 1..23: mol_type = other RNA
cttctgagactttatagttttgg

SEQ ID NO: 2868 - RNA, 23 nt, synthetic construct
  source 1..23: mol_type = other RNA
acataccagtgtaattcaaagga

SEQ ID NO: 2869 - RNA, 23 nt, synthetic construct
  source 1..23: mol_type = other RNA
ataccagtgtaattcaaaggagc

SEQ ID NO: 2870 - RNA, 23 nt, synthetic construct
  source 1..23: mol_type = other RNA
ggaccacctgaatctccctgagt

SEQ ID NO: 2871 - RNA, 23 nt, synthetic construct
  source 1..23: mol_type = other RNA
catgctggtgactgcatctgagc

SEQ ID NO: 2872 - RNA, 23 nt, synthetic construct
  source 1..23: mol_type = other RNA
cgactttggtgtagacaccaggt

SEQ ID NO: 2873 - RNA, 23 nt, synthetic construct
  source 1..23: mol_type = other RNA
ctttggtgtagacaccaggttgc

SEQ ID NO: 2874 - RNA, 23 nt, synthetic construct
  source 1..23: mol_type = other RNA
tccatgtactcagcgactttggt

SEQ ID NO: 2875 - RNA, 23 nt, synthetic construct
  source 1..23: mol_type = other RNA
gtccatgtactcagcgactttgg

SEQ ID NO: 2876 - RNA, 23 nt, synthetic construct
  source 1..23: mol_type = other RNA
cattgattgaacttgctggaaga

SEQ ID NO: 2877 - RNA, 23 nt, synthetic construct
  source 1..23: mol_type = other RNA
tggcagtattgggcatttggggt

SEQ ID NO: 2878 - RNA, 23 nt, synthetic construct
  source 1..23: mol_type = other RNA
ctggcagtattgggcatttgggg

SEQ ID NO: 2879 - RNA, 23 nt, synthetic construct
  source 1..23: mol_type = other RNA
tctggcagtattgggcatttggg

SEQ ID NO: 2880 - RNA, 23 nt, synthetic construct
  source 1..23: mol_type = other RNA
atctggcagtattgggcatttgg

SEQ ID NO: 2881 - RNA, 23 nt, synthetic construct
  source 1..23: mol_type = other RNA
tactcaccggtactctgccttgt

SEQ ID NO: 2882 - RNA, 23 nt, synthetic construct
  source 1..23: mol_type = other RNA
ctcaccggtactctgccttgtga

SEQ ID NO: 2883 - RNA, 23 nt, synthetic construct
  source 1..23: mol_type = other RNA
ccaatttctgaaagggcacaggg

SEQ ID NO: 2884 - RNA, 23 nt, synthetic construct
  source 1..23: mol_type = other RNA
accaatttctgaaagggcacagg

SEQ ID NO: 2885 - RNA, 23 nt, synthetic construct
  source 1..23: mol_type = other RNA
caatttctgaaagggcacagggc

SEQ ID NO: 2886 - RNA, 23 nt, synthetic construct
  source 1..23: mol_type = other RNA
tccgggactgtactttaataggc

SEQ ID NO: 2887 - RNA, 23 nt, synthetic construct
  source 1..23: mol_type = other RNA
ctccgggactgtactttaatagg

SEQ ID NO: 2888 - RNA, 23 nt, synthetic construct
  source 1..23: mol_type = other RNA
catctgagaacgcaagatgctgg

SEQ ID NO: 2889 - RNA, 23 nt, synthetic construct
  source 1..23: mol_type = other RNA
ccacatctgagaacgcaagatgc

SEQ ID NO: 2890 - RNA, 23 nt, synthetic construct
  source 1..23: mol_type = other RNA
tcccgggtaaattttagaatggc

SEQ ID NO: 2891 - RNA, 23 nt, synthetic construct
  source 1..23: mol_type = other RNA
ctcccgggtaaattttagaatgg

SEQ ID NO: 2892 - RNA, 23 nt, synthetic construct
  source 1..23: mol_type = other RNA
ctcctcgtagtcgccgtcctcgt

SEQ ID NO: 2893 - RNA, 23 nt, synthetic construct
  source 1..23: mol_type = other RNA
agtgcgctctgactgcgagaggt

SEQ ID NO: 2894 - RNA, 23 nt, synthetic construct
  source 1..23: mol_type = other RNA
cgctctgactgcgagaggtgggt

SEQ ID NO: 2895 - RNA, 23 nt, synthetic construct
  source 1..23: mol_type = other RNA
gcgctctgactgcgagaggtggg

SEQ ID NO: 2896 - RNA, 23 nt, synthetic construct
  source 1..23: mol_type = other RNA
tgcgctctgactgcgagaggtgg

SEQ ID NO: 2897 - RNA, 23 nt, synthetic construct
  source 1..23: mol_type = other RNA
cttggtgaggtatccccggcggg

SEQ ID NO: 2898 - RNA, 23 nt, synthetic construct
  source 1..23: mol_type = other RNA
tcttggtgaggtatccccggcgg

SEQ ID NO: 2899 - RNA, 23 nt, synthetic construct
  source 1..23: mol_type = other RNA
gtgaggtatccccggcgggcagc

SEQ ID NO: 2900 - RNA, 23 nt, synthetic construct
  source 1..23: mol_type = other RNA
ttggtgaggtatccccggcgggc

SEQ ID NO: 2901 - RNA, 23 nt, synthetic construct
  source 1..23: mol_type = other RNA
gcaccaccacgtaggtgccaggc

SEQ ID NO: 2902 - RNA, 23 nt, synthetic construct
  source 1..23: mol_type = other RNA
ctcctcgatgtagtcgacatggg

SEQ ID NO: 2903 - RNA, 23 nt, synthetic construct
  source 1..23: mol_type = other RNA
cctcctcgatgtagtcgacatgg

SEQ ID NO: 2904 - RNA, 23 nt, synthetic construct
  source 1..23: mol_type = other RNA
cctcgatgtagtcgacatggggc

SEQ ID NO: 2905 - RNA, 23 nt, synthetic construct
  source 1..23: mol_type = other RNA
tcctcgatgtagtcgacatgggg

SEQ ID NO: 2906 - RNA, 23 nt, synthetic construct
  source 1..23: mol_type = other RNA
atccgcccggtaccgtggagggg

SEQ ID NO: 2907 - RNA, 23 nt, synthetic construct
  source 1..23: mol_type = other RNA
catccgcccggtaccgtggaggg

SEQ ID NO: 2908 - RNA, 23 nt, synthetic construct
  source 1..23: mol_type = other RNA
tccgcccggtaccgtggaggggt

SEQ ID NO: 2909 - RNA, 23 nt, synthetic construct
  source 1..23: mol_type = other RNA
gggctggtattcatccgcccggt

SEQ ID NO: 2910 - RNA, 23 nt, synthetic construct
  source 1..23: mol_type = other RNA
ggggctggtattcatccgcccgg

SEQ ID NO: 2911 - RNA, 23 nt, synthetic construct
  source 1..23: mol_type = other RNA
ctcgggagctgaggctggggagt

SEQ ID NO: 2912 - RNA, 23 nt, synthetic construct
  source 1..23: mol_type = other RNA
gagctgaggctggggagtagagg

SEQ ID NO: 2913 - RNA, 23 nt, synthetic construct
  source 1..23: mol_type = other RNA
gggagctgaggctggggagtaga

SEQ ID NO: 2914 - RNA, 23 nt, synthetic construct
  source 1..23: mol_type = other RNA
cggctgtacccacccgccagggg

SEQ ID NO: 2915 - RNA, 23 nt, synthetic construct
  source 1..23: mol_type = other RNA
gcggctgtacccacccgccaggg

SEQ ID NO: 2916 - RNA, 23 nt, synthetic construct
  source 1..23: mol_type = other RNA
cgcggctgtacccacccgccagg

SEQ ID NO: 2917 - RNA, 23 nt, synthetic construct
  source 1..23: mol_type = other RNA
tggggagtagaggcaggcatcgt

SEQ ID NO: 2918 - RNA, 23 nt, synthetic construct
  source 1..23: mol_type = other RNA
ccactctgtgacacaaagcaggt

SEQ ID NO: 2919 - RNA, 23 nt, synthetic construct
  source 1..23: mol_type = other RNA
cccactctgtgacacaaagcagg

SEQ ID NO: 2920 - RNA, 23 nt, synthetic construct
  source 1..23: mol_type = other RNA
actctgtgacacaaagcaggtgc

SEQ ID NO: 2921 - RNA, 23 nt, synthetic construct
  source 1..23: mol_type = other RNA
gcctgtgatgtcccactctgtga

SEQ ID NO: 2922 - RNA, 23 nt, synthetic construct
  source 1..23: mol_type = other RNA
cagcctgtgatgtcccactctgt

SEQ ID NO: 2923 - RNA, 23 nt, synthetic construct
  source 1..23: mol_type = other RNA
gtgtgctgaccatacagtcctgc

SEQ ID NO: 2924 - RNA, 23 nt, synthetic construct
  source 1..23: mol_type = other RNA
cccacagaggtaggtgccgctgt

SEQ ID NO: 2925 - RNA, 23 nt, synthetic construct
  source 1..23: mol_type = other RNA
ggctcatgcggtaccagtttagc

SEQ ID NO: 2926 - RNA, 23 nt, synthetic construct
  source 1..23: mol_type = other RNA
catgcggtaccagtttagcacga

SEQ ID NO: 2927 - RNA, 23 nt, synthetic construct
  source 1..23: mol_type = other RNA
tggcctgggtgaggggctggggt

SEQ ID NO: 2928 - RNA, 23 nt, synthetic construct
  source 1..23: mol_type = other RNA
ctgggtgaggggctggggtgggc

SEQ ID NO: 2929 - RNA, 23 nt, synthetic construct
  source 1..23: mol_type = other RNA
cctgggtgaggggctggggtggg

SEQ ID NO: 2930 - RNA, 23 nt, synthetic construct
  source 1..23: mol_type = other RNA
gcctgggtgaggggctggggtgg

SEQ ID NO: 2931 - RNA, 23 nt, synthetic construct
  source 1..23: mol_type = other RNA
ccgtcagctgagcccctgcgggc

SEQ ID NO: 2932 - RNA, 23 nt, synthetic construct
  source 1..23: mol_type = other RNA
gccgtcagctgagcccctgcggg

SEQ ID NO: 2933 - RNA, 23 nt, synthetic construct
  source 1..23: mol_type = other RNA
cagctgagcccctgcgggcgggg

SEQ ID NO: 2934 - RNA, 23 nt, synthetic construct
  source 1..23: mol_type = other RNA
tcagctgagcccctgcgggcggg

SEQ ID NO: 2935 - RNA, 23 nt, synthetic construct
  source 1..23: mol_type = other RNA
gtcagctgagcccctgcgggcgg

SEQ ID NO: 2936 - RNA, 23 nt, synthetic construct
  source 1..23: mol_type = other RNA
gtagaagtagatgttcatcccgt

SEQ ID NO: 2937 - RNA, 23 nt, synthetic construct
  source 1..23: mol_type = other RNA
cttaatggtgtagaagtagatgt

SEQ ID NO: 2938 - RNA, 23 nt, synthetic construct
  source 1..23: mol_type = other RNA
taagggtagtgaagcctttctgc

SEQ ID NO: 2939 - RNA, 23 nt, synthetic construct
  source 1..23: mol_type = other RNA
gaggggtgaaatgttagaacggt

SEQ ID NO: 2940 - RNA, 23 nt, synthetic construct
  source 1..23: mol_type = other RNA
tgaggggtgaaatgttagaacgg

SEQ ID NO: 2941 - RNA, 23 nt, synthetic construct
  source 1..23: mol_type = other RNA
tccttttctgatgtgaggggtga

SEQ ID NO: 2942 - RNA, 23 nt, synthetic construct
  source 1..23: mol_type = other RNA
ggctccatctgagggcagcgagc

SEQ ID NO: 2943 - RNA, 23 nt, synthetic construct
  source 1..23: mol_type = other RNA
catctgagggcagcgagctcggg

SEQ ID NO: 2944 - RNA, 23 nt, synthetic construct
  source 1..23: mol_type = other RNA
ccatctgagggcagcgagctcgg

SEQ ID NO: 2945 - RNA, 23 nt, synthetic construct
  source 1..23: mol_type = other RNA
atcgctgctgaggtagctttggg

SEQ ID NO: 2946 - RNA, 23 nt, synthetic construct
  source 1..23: mol_type = other RNA
catcgctgctgaggtagctttgg

SEQ ID NO: 2947 - RNA, 23 nt, synthetic construct
  source 1..23: mol_type = other RNA
ctgctgaggtagctttgggctgc

SEQ ID NO: 2948 - RNA, 23 nt, synthetic construct
  source 1..23: mol_type = other RNA
tcgctgctgaggtagctttgggc

SEQ ID NO: 2949 - RNA, 23 nt, synthetic construct
  source 1..23: mol_type = other RNA
cacgctgtactctctctttggga

SEQ ID NO: 2950 - RNA, 23 nt, synthetic construct
  source 1..23: mol_type = other RNA
tcacgctgtactctctctttggg

SEQ ID NO: 2951 - RNA, 23 nt, synthetic construct
  source 1..23: mol_type = other RNA
ttcacgctgtactctctctttgg

SEQ ID NO: 2952 - RNA, 23 nt, synthetic construct
  source 1..23: mol_type = other RNA
cgagggtagaagggcatttcggg

SEQ ID NO: 2953 - RNA, 23 nt, synthetic construct
  source 1..23: mol_type = other RNA
ccgagggtagaagggcatttcgg

SEQ ID NO: 2954 - RNA, 23 nt, synthetic construct
  source 1..23: mol_type = other RNA
cccggatggggtaaacgacccga

SEQ ID NO: 2955 - RNA, 23 nt, synthetic construct
  source 1..23: mol_type = other RNA
gatggggtaaacgacccgagggt

SEQ ID NO: 2956 - RNA, 23 nt, synthetic construct
  source 1..23: mol_type = other RNA
ggatggggtaaacgacccgaggg

SEQ ID NO: 2957 - RNA, 23 nt, synthetic construct
  source 1..23: mol_type = other RNA
cggatggggtaaacgacccgagg

SEQ ID NO: 2958 - RNA, 23 nt, synthetic construct
  source 1..23: mol_type = other RNA
tcgatcccgtaggccagggaagc

SEQ ID NO: 2959 - RNA, 23 nt, synthetic construct
  source 1..23: mol_type = other RNA
agtgatgtacgtgggtctctcga

SEQ ID NO: 2960 - RNA, 23 nt, synthetic construct
  source 1..23: mol_type = other RNA
caagtaagcgtaggagtcccggt

SEQ ID NO: 2961 - RNA, 23 nt, synthetic construct
  source 1..23: mol_type = other RNA
tcaagtaagcgtaggagtcccgg

SEQ ID NO: 2962 - RNA, 23 nt, synthetic construct
  source 1..23: mol_type = other RNA
agtaagcgtaggagtcccggtgc

SEQ ID NO: 2963 - RNA, 23 nt, synthetic construct
  source 1..23: mol_type = other RNA
cgcgttcaagtaagcgtaggagt

SEQ ID NO: 2964 - RNA, 23 nt, synthetic construct
  source 1..23: mol_type = other RNA
cgtgccgtaggacgcgttcaagt

SEQ ID NO: 2965 - RNA, 23 nt, synthetic construct
  source 1..23: mol_type = other RNA
caggggtgcgtagccagggtagg

SEQ ID NO: 2966 - RNA, 23 nt, synthetic construct
  source 1..23: mol_type = other RNA
gggtgcgtagccagggtaggagc

SEQ ID NO: 2967 - RNA, 23 nt, synthetic construct
  source 1..23: mol_type = other RNA
aggggtgcgtagccagggtagga

SEQ ID NO: 2968 - RNA, 23 nt, synthetic construct
  source 1..23: mol_type = other RNA
gtgagcgttgtacgaggggatga

SEQ ID NO: 2969 - RNA, 23 nt, synthetic construct
  source 1..23: mol_type = other RNA
gcgttgtacgaggggatgaaagc

SEQ ID NO: 2970 - RNA, 23 nt, synthetic construct
  source 1..23: mol_type = other RNA
gaacttggggtagtgagcgttgt

SEQ ID NO: 2971 - RNA, 23 nt, synthetic construct
  source 1..23: mol_type = other RNA
ttggggtagtgagcgttgtacga

SEQ ID NO: 2972 - RNA, 23 nt, synthetic construct
  source 1..23: mol_type = other RNA
gattgctgtagacagggcacagc

SEQ ID NO: 2973 - RNA, 23 nt, synthetic construct
  source 1..23: mol_type = other RNA
aagggtcttgtagccggtcatgt

SEQ ID NO: 2974 - RNA, 23 nt, synthetic construct
  source 1..23: mol_type = other RNA
cagcgggtagggaagggtcttgt

SEQ ID NO: 2975 - RNA, 23 nt, synthetic construct
  source 1..23: mol_type = other RNA
gttgcattcgtacttgatcttgc

SEQ ID NO: 2976 - RNA, 23 nt, synthetic construct
  source 1..23: mol_type = other RNA
gcattcgtacttgatcttgccgt

SEQ ID NO: 2977 - RNA, 23 nt, synthetic construct
  source 1..23: mol_type = other RNA
tgtgtaccaggtagtgtttctgc

SEQ ID NO: 2978 - RNA, 23 nt, synthetic construct
  source 1..23: mol_type = other RNA
taccaggtagtgtttctgcaggt

SEQ ID NO: 2979 - RNA, 23 nt, synthetic construct
  source 1..23: mol_type = other RNA
gtaccaggtagtgtttctgcagg

SEQ ID NO: 2980 - RNA, 23 nt, synthetic construct
  source 1..23: mol_type = other RNA
atctgatgactcataaaggctgc

SEQ ID NO: 2981 - RNA, 23 nt, synthetic construct
  source 1..23: mol_type = other RNA
tagatctgatgactcataaaggc

SEQ ID NO: 2982 - RNA, 23 nt, synthetic construct
  source 1..23: mol_type = other RNA
gtagatctgatgactcataaagg

SEQ ID NO: 2983 - RNA, 23 nt, synthetic construct
  source 1..23: mol_type = other RNA
cattggtatggtttctctccaga

SEQ ID NO: 2984 - RNA, 23 nt, synthetic construct
  source 1..23: mol_type = other RNA
gagatggatgtagttcttgtggc

SEQ ID NO: 2985 - RNA, 23 nt, synthetic construct
  source 1..23: mol_type = other RNA
agagatggatgtagttcttgtgg

SEQ ID NO: 2986 - RNA, 23 nt, synthetic construct
  source 1..23: mol_type = other RNA
ctcaccttctgagaagatgatgt

SEQ ID NO: 2987 - RNA, 23 nt, synthetic construct
  source 1..23: mol_type = other RNA
accttctgagaagatgatgttgt

SEQ ID NO: 2988 - RNA, 23 nt, synthetic construct
  source 1..23: mol_type = other RNA
aaagtcatggtaggggagcttgg

SEQ ID NO: 2989 - RNA, 23 nt, synthetic construct
  source 1..23: mol_type = other RNA
gtcatggtaggggagcttggggt

SEQ ID NO: 2990 - RNA, 23 nt, synthetic construct
  source 1..23: mol_type = other RNA
agtcatggtaggggagcttgggg

SEQ ID NO: 2991 - RNA, 23 nt, synthetic construct
  source 1..23: mol_type = other RNA
aagtcatggtaggggagcttggg

SEQ ID NO: 2992 - RNA, 23 nt, synthetic construct
  source 1..23: mol_type = other RNA
aggttgaactcagcttctgctgc

SEQ ID NO: 2993 - RNA, 23 nt, synthetic construct
  source 1..23: mol_type = other RNA
cccaggttgaactcagcttctgc

SEQ ID NO: 2994 - RNA, 23 nt, synthetic construct
  source 1..23: mol_type = other RNA
gctctgaagtgttctgcttcagc

SEQ ID NO: 2995 - RNA, 23 nt, synthetic construct
  source 1..23: mol_type = other RNA
gcggtagcagtagaagatgatga

SEQ ID NO: 2996 - RNA, 23 nt, synthetic construct
  source 1..23: mol_type = other RNA
gtagcagtagaagatgatgatga

SEQ ID NO: 2997 - RNA, 23 nt, synthetic construct
  source 1..23: mol_type = other RNA
gttaacgcggtagcagtagaaga

SEQ ID NO: 2998 - RNA, 23 nt, synthetic construct
  source 1..23: mol_type = other RNA
aacgcggtagcagtagaagatga

SEQ ID NO: 2999 - RNA, 23 nt, synthetic construct
  source 1..23: mol_type = other RNA
ccgcgtcaggtactcctgtaggt

SEQ ID NO: 3000 - RNA, 23 nt, synthetic construct
  source 1..23: mol_type = other RNA
gccgcgtcaggtactcctgtagg

SEQ ID NO: 3001 - RNA, 23 nt, synthetic construct
  source 1..23: mol_type = other RNA
cgtcaggtactcctgtaggttgc

SEQ ID NO: 3002 - RNA, 23 nt, synthetic construct
  source 1..23: mol_type = other RNA
ccatggagtagacatcggtctgc

SEQ ID NO: 3003 - RNA, 23 nt, synthetic construct
  source 1..23: mol_type = other RNA
ctttgtgacacatttgtttgaga

SEQ ID NO: 3004 - RNA, 23 nt, synthetic construct
  source 1..23: mol_type = other RNA
tactttgtgacacatttgtttga

SEQ ID NO: 3005 - RNA, 23 nt, synthetic construct
  source 1..23: mol_type = other RNA
tctcagctggtacacggcagggt

SEQ ID NO: 3006 - RNA, 23 nt, synthetic construct
  source 1..23: mol_type = other RNA
ctctcagctggtacacggcaggg

SEQ ID NO: 3007 - RNA, 23 nt, synthetic construct
  source 1..23: mol_type = other RNA
agctggtacacggcagggtcagg

SEQ ID NO: 3008 - RNA, 23 nt, synthetic construct
  source 1..23: mol_type = other RNA
aatcactgacaggttttgaaagt

SEQ ID NO: 3009 - RNA, 23 nt, synthetic construct
  source 1..23: mol_type = other RNA
tgccttccagtaagatttggtgt

SEQ ID NO: 3010 - RNA, 23 nt, synthetic construct
  source 1..23: mol_type = other RNA
tggaataggagtaggggctcagc

SEQ ID NO: 3011 - RNA, 23 nt, synthetic construct
  source 1..23: mol_type = other RNA
taggagtaggggctcagcagggc

SEQ ID NO: 3012 - RNA, 23 nt, synthetic construct
  source 1..23: mol_type = other RNA
ataggagtaggggctcagcaggg

SEQ ID NO: 3013 - RNA, 23 nt, synthetic construct
  source 1..23: mol_type = other RNA
aataggagtaggggctcagcagg

SEQ ID NO: 3014 - RNA, 23 nt, synthetic construct
  source 1..23: mol_type = other RNA
gtccatgagcccggcttccgagc

SEQ ID NO: 3015 - RNA, 23 nt, synthetic construct
  source 1..23: mol_type = other RNA
ccgtccatgagcccggcttccga

SEQ ID NO: 3016 - RNA, 23 nt, synthetic construct
  source 1..23: mol_type = other RNA
gaggaggtggtagctggggctgg

SEQ ID NO: 3017 - RNA, 23 nt, synthetic construct
  source 1..23: mol_type = other RNA
ggaggtggtagctggggctgggg

SEQ ID NO: 3018 - RNA, 23 nt, synthetic construct
  source 1..23: mol_type = other RNA
aggaggtggtagctggggctggg

SEQ ID NO: 3019 - RNA, 23 nt, synthetic construct
  source 1..23: mol_type = other RNA
atggtggaggtagagcagcaagg

SEQ ID NO: 3020 - RNA, 23 nt, synthetic construct
  source 1..23: mol_type = other RNA
tggtggaggtagagcagcaaggc

SEQ ID NO: 3021 - RNA, 23 nt, synthetic construct
  source 1..23: mol_type = other RNA
ttggatggcagtagctgcgctga

SEQ ID NO: 3022 - RNA, 23 nt, synthetic construct
  source 1..23: mol_type = other RNA
atggcagtagctgcgctgataga

SEQ ID NO: 3023 - RNA, 23 nt, synthetic construct
  source 1..23: mol_type = other RNA
ctcatcagggtactcctggaaga

SEQ ID NO: 3024 - RNA, 23 nt, synthetic construct
  source 1..23: mol_type = other RNA
atcagggtactcctggaagatgt

SEQ ID NO: 3025 - RNA, 23 nt, synthetic construct
  source 1..23: mol_type = other RNA
aagatgtactcgatctcatcagg

SEQ ID NO: 3026 - RNA, 23 nt, synthetic construct
  source 1..23: mol_type = other RNA
ggcaccaacgtacacgctccagg

SEQ ID NO: 3027 - RNA, 23 nt, synthetic construct
  source 1..23: mol_type = other RNA
gcaccaacgtacacgctccagga

SEQ ID NO: 3028 - RNA, 23 nt, synthetic construct
  source 1..23: mol_type = other RNA
gctctgagcaaggcccacaggga

SEQ ID NO: 3029 - RNA, 23 nt, synthetic construct
  source 1..23: mol_type = other RNA
cgctctgagcaaggcccacaggg

SEQ ID NO: 3030 - RNA, 23 nt, synthetic construct
  source 1..23: mol_type = other RNA
ccgctctgagcaaggcccacagg